(19) United States
(12) Patent Application Publication
(10) Pub. No.: US 2011/0312881 A1
(43) Pub. Date: Dec. 22, 2011

(54) BIFUNCTIONAL POLYPEPTIDE COMPOSITIONS AND METHODS FOR TREATMENT OF METABOLIC AND CARDIOVASCULAR DISEASES

(75) Inventors: Joshua Silverman, Sunnyvale, CA (US); Volker Schellenberger, Palo Alto, CA (US); Willem P. Stemmer, Los Gatos, CA (US); Jeffrey L. Cleland, San Carlos, CA (US)

(73) Assignee: AMUNIX, Inc., Mountain View, CA (US)

(21) Appl. No.: 12/975,054

(22) Filed: Dec. 21, 2010

Related U.S. Application Data
(60) Provisional application No. 61/284,527, filed on Dec. 21, 2009.

(51) Int. Cl. A61K 38/16; C12N 1/19; C12N 1/21; C12N 1/15; C12N 15/63; C07H 21/04; A61P 5/50; A61P 3/10; A61P 9/00; A61P 25/28; C07K 14/00; C12N 5/10; A61P 3/04

(52) U.S. Cl. 514/4.8; 435/325; 435/352; 435/353; 435/358; 435/366; 435/252.3; 435/252.31; 435/252.33; 435/252.34; 435/252.35; 435/254.11; 435/254.2; 435/254.21; 435/254.23; 435/254.3; 435/254.4; 435/254.6; 435/254.7; 435/320.1; 514/6.7; 514/6.9; 514/16.4; 514/17.7; 514/21.2; 530/350; 536/23.4

(57) ABSTRACT

The present invention relates to compositions comprising combinations of biologically active proteins linked to extended recombinant polymer, methods of production of the compositions and their use in treatment of metabolic and cardiovascular diseases, disorders and conditions.

### CROSS-REFERENCE TO RELATED APPLICATIONS

[0001] This application claims the priority benefit of U.S. Provisional Application Ser. No. 61/284,527, filed Dec. 21, 2009.

### STATEMENT REGARDING FEDERALLY SPONSORED RESEARCH

[0002] This invention was made with government support under SBIR grant 2R44GM079873-02 awarded by the National Institutes of Health. The government has certain rights in the invention.

### SEQUENCE LISTING

[0003] The instant application contains a Sequence Listing which has been submitted in ASCII format via EFS-Web and is hereby incorporated by reference in its entirety. Said ASCII copy, created on Feb. 9, 2011, is named 32808201.txt and is 10,726,737 bytes in size.

### BACKGROUND OF THE INVENTION

[0004] Metabolic and cardiovascular diseases represent a substantial health care burden in most developed nations, with cardiovascular diseases remaining the number one cause of death and disability in the United States and most European countries. Metabolic diseases and disorders include a large variety of conditions affecting the organs, tissues, and circulatory system of the body. Of particular concern are endocrine and obesity-related diseases and disorders, which have reached epidemic proportions in most developed nations. Chief amongst these is diabetes; one of the leading causes of death in the United States. Diabetes is divided into two major sub-classes-Type I, also known as juvenile diabetes, or Insulin-Dependent Diabetes Mellitus (IDDM), and Type II, also known as adult onset diabetes, or Non-Insulin-Dependent Diabetes Mellitus (NIDDM). Type I Diabetes is a form of autoimmune disease that completely or partially destroys the insulin producing cells of the pancreas in such subjects, and requires use of exogenous insulin during their lifetime. Even in well-managed subjects, episodic complications can occur, some of which are life-threatening.

[0005] In Type II diabetics, rising blood glucose levels after meals do not properly stimulate insulin production by the pancreas. Additionally, peripheral tissues are generally resistant to the effects of insulin, and such subjects often have higher than normal plasma insulin levels (hyperinsulinemia) as the body attempts to overcome its insulin resistance. In advanced disease states insulin secretion is also impaired.

[0006] Insulin resistance and hyperinsulinemia have also been linked with two other metabolic disorders that pose considerable health risks: impaired glucose tolerance and metabolic obesity. Impaired glucose tolerance is characterized by normal glucose levels before eating, with a tendency toward elevated levels (hyperglycemia) following a meal. These individuals are considered to be at higher risk for diabetes and coronary artery disease. Obesity is also a risk factor for the group of conditions called insulin resistance syndrome, or “Syndrome X,” as is hypertension, coronary artery disease (arteriosclerosis), and lactic acidosis, as well as related disease states. The pathogenesis of obesity is believed to be multifactorial but an underlying problem is that in the obese, nutrient availability and energy expenditure are not in balance until there is excess adipose tissue.

[0007] Dyslipidemia is a frequent occurrence among diabetics; typically characterized by elevated plasma triglycerides, low HDL (high density lipoprotein) cholesterol, normal to elevated levels of LDL (low density lipoprotein) cholesterol and increased levels of small dense, LDL particles in the blood. Dyslipidemia is a main contributor to an increased incidence of coronary events and deaths among diabetic subjects.

[0008] Cardiovascular disease can be manifest by many disorders involving the heart and vasculature throughout the body, including aneurysms, angina, atherosclerosis, cerebrovascular accident (Stroke), cerebrovascular disease, congestive heart failure, coronary artery disease, myocardial infarction, and peripheral vascular disease, amongst others.

[0009] Most metabolic processes and many cardiovascular parameters are regulated by multiple peptides and hormones, and many such peptides and hormones, as well as analogues thereof, have found utility in the treatment of such diseases and disorders. However, the use of single therapeutic peptides and/or hormones, even when augmented by the use of small molecule drugs, has met with limited success in the management of such diseases and disorders. In particular, dose optimization is important for drugs and biologics used in the treatment of metabolic diseases, especially those with a narrow therapeutic window. Hormones in general, and peptides involved in glucose homeostasis often have a narrow therapeutic window. The narrow therapeutic window, coupled with the fact that such hormones and peptides typically have a short half-life, results in difficulties in the management of such patients. Therefore, there remains a need for therapeutics with increased efficacy and safety in the treatment of metabolic and cardiovascular diseases. The present invention addresses this need by providing bifunctional compositions comprising combinations of biologically active proteins fused to extended recombinant polypeptides selected to tailor the pharmacokinetic properties of the compositions, providing controlled and extended exposures within the therapeutic window for the biologics.

### SUMMARY OF THE INVENTION

[0010] The present invention is directed to compositions and methods of treatment or prevention of metabolic and/or cardiovascular diseases, disorders or conditions. In particular, the present invention provides compositions comprising biologically active proteins and extended recombinant polypeptides (XTEN), resulting in fusion proteins that are either monomeric fusion proteins with two different biologically active proteins or are compositions of two different monomeric fusion proteins with one biologically active protein each; collectively bifunctional fusion protein compositions (herein after “BFXTEN”). In part, the present disclosure is directed to pharmaceutical compositions comprising the fusion proteins and the uses thereof for treating metabolic- and/or cardiovascular-related diseases, disorders or conditions. The BFXTEN compositions have enhanced pharmacokinetic properties compared to BP not linked to XTEN, which may permit more convenient dosing and improved efficacy. In some embodiments, the BFXTEN compositions of the invention do not have a component selected the group consisting of: polyethylene glycol (PEG), albumin, and an antibody fragment such as an Fc fragment.

[0011] In one aspect, the invention provides compositions comprising fusion proteins of BP and XTEN in different configurations and/or in different combinations. In one embodiment, the invention provides compositions of a monomeric fusion protein of formula V:

(XTEN)ᵤ-(S)ᵥ-(BP1)-(S)_{w}-(XTEN)-(S)ₓ-(BP2)-(S)_{y}-(XTEN)_{z} V

wherein independently for each occurrence BP1 is a is a biologically active protein comprising a sequence that exhibiting at least about 90%, or about 95%, or about 96%, or about 97%, or about 98%, or about 99% sequence identity to an amino acid sequence selected from Table 1; BP2 is a is a biologically active protein different from BP1 that exhibits at least about 90%, or about 95%, or about 96%, or about 97%, or about 98%, or about 99% sequence identity to an amino acid sequence selected from Table 1; S is a spacer sequence having between 1 to about 50 amino acid residues that can optionally include a cleavage sequence selected from Table 6 or amino acids compatible with restriction sites selected from Table 5, u is either 0 or 1, v is either 0 or 1, w is either 0 or 1, x is either 0 or 1, y is either 0 or 1, z is either 0 or 1, with the proviso that u+v+w+x+y+z≧1, and XTEN is an extended recombinant polypeptide comprising greater than about 100 to about 3000 amino acids. The XTEN sequence(s) of the fusion protein are characterized in that: the sequence(s) are substantially non-repetitive sequence such that: (1) the sequence contains no three contiguous amino acids that are identical unless the amino acids are serine residues; or (2) at least about 80% of the XTEN sequence consists of non-overlapping sequence motifs, each of the sequence motifs comprising about 9 to about 14 amino acid residues, wherein any two contiguous amino acid residues does not occur more than twice in each of the sequence motifs; or (3) the XTEN has a subsequence score or less than 3 or less than 2; the sum of glycine (G), alanine (A), serine (S), threonine (T), glutamate (E) and proline (P) residues constitutes more than about 80% of the total amino acid sequence of the XTEN; the XTEN sequence lacks a predicted T-cell epitope when analyzed by TEPITOPE algorithm, wherein the TEPITOPE algorithm prediction for epitopes within the XTEN sequence is based on a score of −5, or −6, or −8, or −9 or −10; the XTEN sequence has greater than about 90%, or about 95%, or about 99% random coil formation as determined by GOR algorithm and the XTEN sequence has less than 5%, or less than 4%, or less than 3%, or less than 2% alpha helices and less than 5%, or less than 4%, or less than 3%, or less than 2% beta-sheets as determined by Chou-Fasman algorithm. In one embodiment, the XTEN is further characterized in that the sum of asparagine and glutamine residues is less than 10% of the total amino acid sequence of the XTEN, the sum of methionine and tryptophan residues is less than 2% of the total amino acid sequence of the XTEN, and no one type of amino acid constitutes more than 30% of the XTEN sequence. In one embodiment, the XTEN is further characterized in that the XTEN sequence has less than 10%, or less than 5%, or less than 4%, or less than 3%, or less than 2% amino acid residues with a positive charge. In another embodiment, the XTEN of the composition has at least about 80%, or about 85%, or about 90%, or about 91%, or about 92%, or about 93%, or about 94%, or about 95%, or about 96%, or about 97%, or about 98%, or about 99% of the sequence consisting of non-overlapping sequence motifs, wherein each of the sequence motifs has 12 amino acid residues selected from one or more sequences of Table 3. The motifs of the XTEN sequence can be selected from a single family, i.e., AD, AE, AF, AG, AM, AQ, BC or BD. The XTEN of the composition can be identical or they can be different. In one embodiment, the XTEN of the composition each exhibit at least about 80%, or at least about 85%, or at least about 90%, or at least about 91%, or at least about 92%, or at least about 93%, or at least about 94%, or at least about 95%, or at least about 96%, or at least about 97%, or at least about 98%, or at least about 99% identity with a sequence selected from Table 4 or a fragment thereof.

[0012] In another embodiment, the invention provides compositions of a monomeric fusion protein of formula VI:

(XTEN)ᵥ-(S)_{w}-(BP1)-(S)ₓ-(BP2)-(S)_{y}-(XTEN)_{z} VI

wherein independently for each occurrence BP1 is a is a biologically active protein comprising a sequence that exhibiting at least about 90%, or about 95%, or about 96%, or about 97%, or about 98%, or about 99% sequence identity to an amino acid sequence selected from Table 1; BP2 is a is a biologically active protein different from BP1 that exhibits at least about 90%, or about 95%, or about 96%, or about 97%, or about 98%, or about 99% sequence identity to an amino acid sequence selected from Table 1; S is a spacer sequence having between 1 to about 50 amino acid residues that can optionally include a cleavage sequence selected from Table 6 or amino acids compatible with restriction sites selected from Table 5, v is either 0 or 1, w is either 0 or 1, x is either 0 or 1, y is either 0 or 1, z is either 0 or 1, with the proviso that v+w+x+y+z≧1, and XTEN is an extended recombinant polypeptide comprising greater than about 100 to about 3000 amino acids with the characteristics as described for formula V, above.

[0013] In other embodiments, the invention provides BFXTEN compositions comprising a first fusion protein and a second fusion protein, wherein the first fusion protein comprises a first biologically active protein (BP1) comprising a sequence that exhibits at least 90% sequence identity to a sequence from Table 1, wherein the BP1 is linked to one or more extended recombinant polypeptides (XTEN) each comprising greater than about 100 to about 3000 amino acid residues and the second fusion protein comprises a second biologically active protein (BP2) comprising a sequence that exhibits at least 90% sequence identity to a sequence from Table 1 and that is different from the BP1 of (a), wherein the BP2 is linked to one or more extended recombinant polypeptides (XTEN) each comprising greater than about 100 to about 3000 amino acid residues with the characteristics as described for formula V, above. In one embodiment of the foregoing, the first fusion protein is of formula I

(BP1)-(S)ₓ-(XTEN) I

or formula III

(XTEN)-(S)ₓ-(BP1) III

and the second fusion protein is of formula II

(BP2)-(S)_{y}-(XTEN) II

or formula IV

(XTEN)-(S)_{y}-(BP2) IV

wherein independently for each occurrence BP1 is a is a biologically active protein comprising a sequence that exhibiting at least about 80%, or about 90%, or about 95%, or about 96%, or about 97%, or about 98%, or about 99% sequence identity to an amino acid sequence selected from Table 1; BP2 is a is a biologically active protein different from BP1 that exhibits at least about 80%, or about 90%, or about 95%, or about 96%, or about 97%, or about 98%, or about 99% sequence identity to an amino acid sequence selected from Table 1; S is a spacer sequence having between 1 to about 50 amino acid residues that can optionally include a cleavage sequence selected from Table 6 or amino acids compatible with restriction sites selected from Table 5, x is either 0 or 1, y is either 0 or 1, and XTEN is an extended recombinant polypeptide comprising greater than about 100 to about 3000 amino acids with the characteristics as described for formula V, above, and the first and the second fusion protein are at a fixed ratio in the composition of about 1:1 to about 1:1500.

[0014] The invention provides BFXTEN compositions comprising two fusion proteins, each with a different BP, wherein each fusion protein has at least about 80%, or about 90%, or about 95%, or about 96%, or about 97%, or about 98%, or about 99% sequence identity to an amino acid sequence selected from Table 33. The invention provides BXTEN compositions of monomeric fusion protein with two different BP, wherein the fusion protein has at least about 80%, or about 90%, or about 95%, or about 96%, or about 97%, or about 98%, or about 99% sequence identity to an amino acid sequence selected from Table 34 or Table 35 or Table 36 or Table 37.

[0015] The BFXTEN compositions of the foregoing embodiments have enhanced pharmacokinetic properties when administered to a subject, such as a human, compared to the corresponding BP not linked to XTEN, which may permit more convenient dosing and improved efficacy. The enhanced pharmacokinetic properties include increased terminal half-life, increased area under the curve, volume of distribution, increased time spent within the therapeutic window, increased time between consecutive administrations to maintain the BFXTEN within the therapeutic window, and increased bioavailability. In one embodiment, the BXTEN composition, when administered to a subject, exhibits a terminal half-life at least about two-fold longer, or about three-fold longer, or about four-fold longer, or about five-fold longer, or about 10-fold longer, or about 20-fold longer compared to the corresponding BP1 and/or the BP2 not linked to the XTEN and administered at a comparable dose to a subject. In another embodiment, the BXTEN composition, when administered to a subject, exhibits an increased area under the curve (AUC) of at least about two-fold, or at least about four-fold, or at least about five-fold, or at least about 10-fold, or at least about 15-fold, or at least about 20-fold compared to the corresponding BP1 and/or the BP2 not linked to the XTEN and administered at a comparable dose to a subject. In another embodiment, the BXTEN composition, when administered to a subject, exhibits an increased time within the therapeutic window of at least about two-fold, or at least about four-fold, or at least about five-fold, or at least about 10-fold, or at least about 15-fold, or at least about 20-fold longer compared to the corresponding BP1 and/or the BP2 not linked to the XTEN and administered at a comparable dose to a subject. In another embodiment, the administration of multiple consecutive doses of a BFXTEN using a therapeutically effective dose regimen to a subject in need thereof results in a gain in time of at least two-fold, or at least three-fold, or at least four-fold, or at least five-fold, or at least 10-fold, or at least 20-fold between consecutive Cₘₐₓ peaks and/or Cₘᵢₙ troughs for blood levels of the fusion protein compared to the corresponding BP not linked to the XTEN and administered to a subject at a therapeutically effective dose regimen for the BP.

[0016] The invention provides BFXTEN compositions with enhanced pharmacologic properties when administered to a subject, such as a human, compared to the corresponding BP not linked to XTEN, which may permit more convenient dosing and improved efficacy and safety. Administration of multiple consecutive doses using a therapeutically effective dose regimen of the BFXTEN to a subject in need thereof results in an improvement in at least one measured parameter associated with a metabolic or cardiovascular disease or condition using an accumulatively smaller amount of about 5%, or about 10%, or about 20%, or about 40%, or about 50%, or about 60%, or about 70%, or about 80%, or about 90% less moles of fusion protein administered compared to the corresponding BP1 and/or BP2 not linked to the XTEN and administered at a therapeutically effective dose regimen for the BP1 and/or BP2 to a subject. The accumulative amount is measured for a period of at least about one week, or about 14 days, or about 21 days, or about one month. The one measured parameter is selected from the group selected from fasting glucose level, response to oral glucose tolerance test, peak change of postprandial glucose from baseline glucose level, HA_{1c}, level, daily caloric intake, satiety, rate of gastric emptying, insulin secretion in response to glucose challenge, peripheral insulin sensitivity, glucose level in response to insulin challenge, beta cell mass, body weight reduction, left ventricular diastolic function, E/A ratio, left ventricular end diastolic pressure, cardiac output, cardiac contractility, left ventricular mass, left ventricular mass to body weight ratio, left ventricular volume, left atrial volume, left ventricular end diastolic dimension (LVEDD), left ventricular end systolic dimension (LVESD), infarct size, exercise capacity, exercise efficiency, and heart chamber size.

[0017] The invention provides BFXTEN wherein a fusion protein of formula I, II, III, IV, V, or VI exhibits a biological activity of at least about 60%, or at least about 70%, or at least about 80%, or at least about 90% for the respective BP1 and BP2 components of the BFXTEN compared to the BP1 and BP2 components not linked to the fusion protein. In another embodiment, the isolated fusion protein of formula I, II, III, IV, V, or VI exhibits binds the target receptor or ligand with about 10%, or at least about 20%, or at least about 30%, or at least about 40%, or at least about 50%, or at least about 60%, or at least about 70%, or at least about 80%, or at least about 90%, or at least about 95%, or at least about 99% or more of the affinity of a native BP not bound to XTEN.

[0018] The invention provides a method for increasing the terminal half-life of a BFXTEN by producing a single chain fusion protein construct comprising at least a first biologically active protein and an XTEN sequence in a first N- to C-terminus configuration, wherein the fusion protein in the first configuration of the biologically active protein and XTEN components has reduced receptor-mediated clearance compared to a BFXTEN in a second configuration wherein the biologically active protein and an XTEN components are in a second, different N- to C-terminus configuration. In one embodiment of the method, the configuring of the BFXTEN in the first configuration results in a fusion protein wherein the receptor binding for the receptor of the biologically active protein component in the range of about 2-30%, or about 3-20%, or about 4-15%, or about 5-10% compared to the BFXTEN in the second Configuration. In another embodiment of the method, the configuring of the BFXTEN in the first configuration results in a fusion protein wherein administration of the fusion protein to a subject results in an increase in the terminal half-life of at least about two-fold, or at least three-fold, or at least four-fold, or at least five-fold compared to the half-life of a BFXTEN in the second configuration.

the XTEN sequence has less than 10%, or less than 5%, or less than 4%, or less than 3%, or less than 2% amino acid residues with a positive charge; the XTEN sequence has greater than 80%, or about 85%, or about 90%, or about 91%, or about 92%, or about 93%, or about 94%, or about 95%, or about 96%, or about 97%, or about 98%, or about 99% random coil formation as determined by GOR algorithm; and the XTEN sequence has less than 2% alpha helices and 2% beta-sheets as determined by Chou-Fasman algorithm.

[0019] In some cases, the invention provides BFXTEN fusion proteins in which at least about 80%, or about 85%, or about 90%, or about 91%, or about 92%, or about 93%, or about 94%, or about 95%, or about 96%, or about 97%, or about 98%, or about 99% of the XTEN sequence consists of non-overlapping sequence motifs, wherein each of the sequence motifs has 12 amino acid residues. In one embodiment of the foregoing, the sequence motifs are selected from one or more sequences of Table 3.

[0020] The invention provides BFXTEN fusion proteins with an increased apparent molecular weight as determined by size exclusion chromatography, compared to the actual molecular weight, wherein the apparent molecular weight is at least about 100 kD, or at least about 150 kD, or at least about 200 kD, or at least about 300 kD, or at least about 400 kD, or at least about 500 kD, or at least about 600 kD, or at least about 700 kD, while the actual molecular weight of each biologically active protein component of the fusion protein is less than about 25 kD. Accordingly, the BFXTEN fusion proteins can have an apparent molecular weight that is about 4-fold greater, or 5-fold greater, or about 6-fold greater, or about 7-fold greater, or about 8-fold, or about 10-fold, or about 5-fold greater than the actual molecular weight of the fusion protein. Accordingly, the BFXTEN fusion proteins have an apparent molecular weight factor under physiologic conditions that is greater than about 4, or about 5, or about 6, or about 7, or about 8, or about 10, or greater than about 15.

[0021] The invention provides pharmaceutical compositions comprising a fusion protein of any of the foregoing embodiments at least one pharmaceutically acceptable carrier. In one embodiment, the invention provides pharmaceutical compositions comprising either a monomeric BFXTEN comprising a BP1 and a BP2 or a combination of two BFXTEN fusion proteins each comprising a different biologically active protein and at least one pharmaceutically acceptable carrier. In another embodiment, the invention provides kits, comprising packaging material and at least a first container comprising the pharmaceutical composition of the foregoing embodiment and a label identifying the pharmaceutical composition and storage and handling conditions, and a sheet of instructions for the reconstitution and/or administration of the pharmaceutical compositions to a subject.

[0022] In another aspect, the invention provides a method of treating or preventing a metabolic or cardiovascular-related disease, disorder or condition, comprising administering a pharmaceutical composition comprising BFXTEN fusion protein(s) of any of the foregoing embodiments to a subject in need thereof. In one embodiment of the foregoing, the disease, disorder or condition is selected from type 1 diabetes, type 2 diabetes, obesity, hyperglycemia, hyperinsulinemia, decreased insulin production, insulin resistance, syndrome X and retinal neurodegenerative processes. In another embodiment of the foregoing, the disease, disorder or condition is selected from myocardial infarction, cardiac valve disease, stroke, post-surgical catabolic changes, hibernating myocardium or diabetic cardiomyopathy, hypertrophic cardiomyopathy, heart insufficiency, aortic stenosis, valvular regurgitation, and intermittent claudication.

[0023] The pharmaceutical composition can be administered subcutaneously (including subcutaneously by infusion pump), intramuscularly, or intravenously. In one embodiment of the method of treatment, the pharmaceutical composition is administered at a therapeutically effective amount. In a feature of the method, the administration of the therapeutically effective amount results in a gain in time spent within a therapeutic window for the fusion protein(s) of the pharmaceutical composition compared to the corresponding biologically active protein component(s) not linked to the fusion protein and administered at a comparable dose to a subject. In one embodiment, the gain in time spent within the therapeutic window is at least three-fold, or at least four-fold, or at least five-fold compared to the corresponding biologically active protein component(s) not linked to the fusion protein and administered at a comparable dose to a subject. The method of treatment includes administration of multiple consecutive doses of the pharmaceutical composition at therapeutically effective doses, thereby establishing a therapeutically effective dose regimen. In one embodiment of the foregoing method of treatment, the therapeutically effective dose regimen results in a gain in time of at least four-fold between at least two consecutive C^{max} peaks and/or Cₘᵢₙ troughs for blood levels of the fusion protein compared to the corresponding glucose regulating peptide(s) of the fusion protein not linked to the fusion protein and administered at a comparable dose regimen to a subject. In another embodiment of the method of treatment, administration of the pharmaceutical composition results in an improvement in at least one measured parameter using a lower dose in moles of the fusion protein(s) of the pharmaceutical composition compared to the corresponding biologically active protein component(s) not linked to the fusion protein and administered at a comparable unit dose or dose regimen to a subject. In one embodiment of the foregoing, the one measured parameter is selected from fasting glucose level, response to oral glucose tolerance test, peak change of postprandial glucose from baseline glucose level, HA1c level, daily caloric intake, satiety, rate of gastric emptying, insulin secretion in response to glucose challenge, peripheral insulin sensitivity, glucose level in response to insulin challenge, beta cell mass, and body weight reduction.

[0024] In another aspect, the invention provides an isolated nucleic acid comprising a polynucleotide sequence selected from (a) a polynucleotide encoding the fusion protein of any one of the embodiments hereinabove identified, or (b) the complement of the polynucleotide of (a).

[0025] The invention also provides an expression vector comprising a polynucleotide sequence encoding the fusion protein of any one of the embodiments hereinabove identified. In one embodiment, the expression vector further comprises a recombinant regulatory sequence operably linked to the polynucleotide sequence, wherein the regulatory sequence is a promoter. In another embodiment, the regulatory sequence comprises one or more transcriptional regulatory elements that control expression of the polynucleotide sequence. The expression vector can further comprise a polynucleotide sequence fused in frame to a polynucleotide encoding a secretion signal sequence. In one embodiment, the secretion signal sequence is a prokaryotic signal sequence. The secretion signal sequence can be selected from OmpA, DsbA, and PhoA signal sequences. In another embodiment, the secretion signal sequence is a eukaryotic signal sequence. The secretion signal sequence can be selected from yeast, insect, and mammalian signal sequences. The expression vector can further comprise a polynucleotide sequence fused to a leader sequence, separable from the polynucleotide sequence encoding any of the fusion proteins herein identified, by a polynucleotide sequence encoding a cleavage site. The cleavage site can be a chemical cleavage site or a proteolytic site. In one embodiment, the proteolytic site is susceptible to cleavage by a protease selected from FXIa, FXIIa, kallikrein, FVIIa, FIXa, FXa, FIIa (thrombin), Elastase-2, granzyme B, MMP-12, MMP-13, MMP-17 or MMP-20, TEV, enterokinase, rhinovirus 3C protease, and sortase A.

[0026] The invention further provides a host cell, comprising any of the expression vectors identified herein. The host cell can be a eukaryotic cell, such as yeast, insect, or mammalian cells. The host cell can be a prokaryotic cell, such as E. coli.

[0027] The invention further provides kits, comprising a labeled vial containing any one of the pharmaceutical compositions identified herein and instructions for use.

[0028] The invention provides an isolated fusion protein comprising a polypeptide sequence that has at least 80% sequence identity, or 81%, 82%, 83%, 84%, 85%, 86%, 87%, 88%, 89%, 90%, 91%, 92%, 93%, 94%, 95%, 96%, 97%, 98%, 99%, or 100% sequence identity to a sequence selected from Tables 33-38.

[0029] The invention provides an isolated nucleic acid comprising a polynucleotide sequence that has at least 80% sequence identity, or 81%, 82%, 83%, 84%, 85%, 86%, 87%, 88%, 89%, 90%, 91%, 92%, 93%, 94%, 95%, 96%, 97%, 98%, 99%, or 100% sequence identity to (a) a polynucleotide sequence that encodes a polypeptide selected from Table 33-38; or (b) the complement of the polynucleotide of (a).

### INCORPORATION BY REFERENCE

[0030] All publications, patents, and patent applications mentioned in this specification are herein incorporated by reference to the same extent as if each individual publication, patent, or patent application was specifically and individually indicated to be incorporated by reference.

### BRIEF DESCRIPTION OF THE DRAWINGS

[0031] The features and advantages of the invention may be further explained by reference to the following detailed description and accompanying drawings that sets forth illustrative embodiments.

[0032] FIG. 1 shows schematic representations of seven exemplary BFXTEN fusion proteins or compositions of BFXTEN fusion proteins (FIGS. 1A-G); all depicted in an N- to C-terminus orientation. FIG. 1A shows a combination BFXTEN composition (100) comprising two fusion proteins; the first of which has an XTEN molecule (102) attached to the C-terminus of a biologically active protein 1 (BP1) (103), and the second of which has an XTEN molecule attached to the N-terminus of a spacer sequence (105), which in turn is attached to the N-terminus of a biologically active protein 2 (BP2) (104). FIG. 1B shows a combination BFXTEN composition (100) comprising two fusion proteins, both of which have an XTEN attached to the C-termini of respective BP1 and BP2. FIG. 1C shows a monomeric BFXTEN fusion protein (101) in which the XTEN is linked to the C-terminus of a BP1 and the N-terminus of a BP2. FIG. 1D shows a monomeric BFXTEN fusion protein (101) in which a BP2 is linked to the C-terminus of a BP1, and an XTEN is linked to the C-terminus of a BP2. FIG. 1D shows a monomeric BFXTEN fusion protein (101) in which a BP2 is linked to the C-terminus of a BP1, and an XTEN is linked to the C-terminus of a BP2. FIG. 1E shows a monomeric BFXTEN fusion protein in the opposite configuration of FIG. 1D in which a BP2 is linked to the C-terminus of a BP1, and an XTEN is linked to the N-terminus of a BP1. FIG. 1F shows a monomeric BFXTEN fusion protein (101) in which a BP1 is linked to the N-terminus of a spacer sequence, which in turn is linked to the N-terminus of an XTEN, the C-terminus of the XTEN is linked to the N-terminus of a second spacer sequence, and the second spacer sequence is linked to the N-terminus of a BP2. FIG. 1G shows a monomeric BFXTEN fusion protein (101) in which a BP1 is linked to the N-terminus of a spacer sequence, the C-terminus of the spacer sequence is linked to the N-terminus of a BP2, and the BP2 is linked to the N-terminus of an XTEN.

[0033] FIG. 2 is a schematic illustration of seven representative polynucleotide constructs or combinations of constructs (FIGS. 2A-G) of BPXTEN genes that encode the corresponding BFXTEN polypeptides of FIG. 1; all depicted in a 5′ to 3′ orientation. In these illustrative examples of genes encoding combination BFXTEN (200) or monomeric BFXTEN (201) fusion proteins, the polynucleotide encodes the following components: XTEN (202), BP1 (203); BP2 (204); and spacer amino acids that can include a cleavage sequence (205), with all sequences linked in frame.

[0034] FIG. 3 is a schematic illustration of an exemplary monomeric BFXTEN acted upon by an endogenously available protease and the ability of the reaction products to bind to a target receptor on a cell surface, with subsequent cell signaling. FIG. 3A shows a monomeric BFXTEN fusion protein (101) in which a BP1 (103) and a BP2 (104) are each linked to the XTEN (102) by spacer sequences that contain a first (105) and a second (106) cleavable sequence, the latter (106) being susceptible to MMP-13 protease (107). FIG. 3B shows the reaction products of a free BP2 (104) and BP1-Spacer Sequence-XTEN (108), plus unreacted BFXTEN (101). FIG. 3C shows the interaction of the reaction product free BP2 (104) with target receptors (110) to BP2 on a cell surface (109). In this case, optimal binding to the receptor is exhibited when BP2 has a free N-terminus. FIG. 3D shows the interaction of the intact BFXTEN with the BP2 receptor that, in this case, has reduced binding affinity due to lack of a free N-terminus. FIG. 3E shows that the free BP2, with high binding affinity, remains bound to the receptor, which has been internalized into an endosome (112) within the cell (109), illustrating receptor-mediated clearance of the bound BP2 and triggering cell signaling (111), portrayed as stippled cytoplasm. FIG. 3F illustrates that the intact BFXTEN (101), with reduced binding affinity to the receptor (110), is nevertheless able to initiate cell signaling without receptor mediated clearance, with the net result that the BFXTEN remains bioavailable.

[0035] FIG. 4 is a schematic flowchart of representative steps in the assembly, production and the evaluation of a XTEN.

[0036] FIG. 5 is a schematic flowchart of representative steps in the assembly of an BFXTEN polynucleotide construct encoding a fusion protein. Individual oligonucleotides 501 are annealed into sequence motifs 502 such as a 12 amino acid motif (“12-mer”), which is subsequently ligated with an oligo containing BbsI, and KpnI restriction sites 503. Additional sequence motifs from a library are annealed to the 12-mer until the desired length of the XTEN gene 504 is achieved. The XTEN gene is cloned into a stuffer vector. The vector encodes a glucagon gene 506 followed by BsaI, BbsI, and KpnI sites 507 and an exendin-4 gene 508, resulting in the gene 500 encoding an BFXTEN fusion protein encoding two BP.

[0037] FIG. 6 is a schematic flowchart of representative steps in the assembly of a gene encoding fusion protein comprising a biologically active protein (BP) and XTEN, its expression and recovery as a fusion protein, and its evaluation as a candidate BFXTEN component.

[0038] FIG. 7 is a schematic representation of the design of Ex4XTEN expression vectors with different processing strategies for use in producing a single fusion protein of a BCXTEN. FIG. 7A shows an exemplary expression vector encoding XTEN fused to the 3′ end of the sequence encoding biologically active protein Ex4. Note that no additional leader sequences are required in this vector. FIG. 7B depicts an expression vector encoding XTEN fused to the 5′ end of the sequence encoding Ex4 with a CBD leader sequence and a TEV protease site. FIG. 7C depicts an expression vector as in FIG. 7B where the CBD and TEV processing site have been replaced with an optimized N-terminal leader sequence (NTS). FIG. 7D depicts an expression vector encoding an NTS sequence, an XTEN, a sequence encoding Ex4, and than a second sequence encoding an XTEN.

[0039] FIG. 8 shows results of expression assays for the indicated constructs comprising GFP and XTEN sequences using NTS. The expression cultures were assayed using a fluorescence plate reader (excitation 395 nm, emission 510 nm) to determine the amount of GFP reporter present. The results, graphed as box and whisker plots, indicate that while median expression levels were approximately half of the expression levels compared to the “benchmark” CBD N-terminal helper domain, the best clones from the libraries were much closer to the benchmarks, indicating that further optimization around those sequences was warranted. The results also show that the libraries starting with amino acids MA had better expression levels than those beginning with ME (see Example 14).

[0040] FIG. 9 shows three randomized libraries used for the third and fourth codons in the N-terminal sequences of clones from LCW546, LCW547 and LCW552. The libraries were designed with the third and fourth residues modified such that all combinations of allowable XTEN codons were present at these positions, as shown. In order to include all the allowable XTEN codons for each library, nine pairs of oligonucleotides encoding 12 amino acids with codon diversities of third and fourth residues were designed, annealed and ligated into the NdeI/BsaI restriction enzyme digested stuffer vector pCW0551 (Stuffer-XTEN_AM875-GFP), and transformed into E. coli BL21Gold(DE3) competent cells to obtain colonies of the three libraries LCW0569 (SEQ ID NOS 2371-2372), LCW0570 (SEQ ID NOS 2373-2374), and LCW0571 (SEQ ID NOS 2375-2376).

[0041] FIG. 10 shows a histogram of a retest of the top 75 clones after the optimization step, as described in Example 15, for GFP fluorescence signal, relative to the benchmark CBD_AM875 construct. The results indicated that several clones were now superior to the benchmark clones, as seen in FIG. 10.

[0042] FIG. 11 is a schematic of a combinatorial approach undertaken for the union of codon optimization preferences for two regions of the N-terminus 48 amino acids. The approach created novel 48mers at the N-terminus of the XTEN protein for evaluation of the optimization of expression that resulted in leader sequences that may be a solution for expression of XTEN proteins where the XTEN is N-terminal to the BP.

[0043] FIG. 12 shows an SDS-PAGE gel confirming expression of preferred clones obtained from the XTEN N-terminal codon optimization experiments, in comparison to benchmark XTEN clones comprising CBD leader sequences at the N-terminus of the construct sequences.

[0044] FIG. 13 shows an SDS-PAGE gel of samples from a stability study of the fusion protein of XTEN_AE864 fused to the N-terminus of GFP (see Example 21). The GFP-XTEN was incubated in cynomolgus plasma and rat kidney lysate for up to 7 days at 37° C. In addition, GFP-XTEN administered to cynomolgus monkeys was also assessed. Samples were withdrawn at 0, 1 and 7 days and analyzed by SDS PAGE followed by detection using Western analysis and detection with antibodies against GFP. The results demonstrate the resistance of fusion proteins comprising XTEN to degradation due to serum proteases; a factor in the enhancement of pharmacokinetic properties of the BFXTEN fusion proteins.

[0045] FIG. 14 shows two samples of 2 and 10 mcg of final purified fusion protein of IL-1ra linked to XTEN_AE864 subjected to non-reducing SDS-PAGE, as described in Example 22. The results show that the BFXTEN component fusion protein was recovered by the process, with an approximate MW of about 160 kDa.

[0046] FIG. 15 shows the output of a representative size exclusion chromatography analysis performed, as described in Example 23. The calibration standards, shown in the dashed line, include the markers thyroglobulin (670 kDa), bovine gamma-globulin (158 kDa), chicken ovalbumin (44 kDa), equine myoglobuin (17 kDa) and vitamin B12 (1.35 kDa). The BFXTEN component fusion protein of IL-1ra linked to XTEN_AM875 is shown as the solid line. The data show that the apparent molecular weight of the BFXTEN monomeric component is significantly larger than that expected for a globular protein (as shown by comparison to the standard proteins run in the same assay), and has an apparent molecular weight significantly greater than that determined by SDS-PAGE, as shown in FIG. 15, resulting in an apparent molecular weight factor of greater than 9 (see Table 23).

[0047] FIG. 16 shows the reverse phase C18 analysis of purified IL-1ra_XTEN_AM875 The output, in absorbance versus time, demonstrates the purity of the final product fusion protein.

[0048] FIG. 17 shows the results of the IL-1 receptor binding assay, plotted as a function of IL-1ra-XTEN_AM875 or IL-1ra concentration to produce a binding isotherm. To estimate the binding affinity of each fusion protein for the IL-1 receptor, the binding data was fit to a sigmoidal dose-response curve. From the fit of the data an EC50 (the concentration of IL-1ra or IL-1ra-XTEN at which the signal is half maximal) for each construct was determined, as described in Example 23. The results show that the attachment of IL-1ra to the C-terminus of the XTEN reduces the binding affinity, compared to configuration where IL-1ra is on the N-terminus of the fusion protein. The negative control XTEN_AM875-hGH construct showed no binding under the experimental conditions.

[0049] FIG. 18 shows an SDS-PAGE of a thermal stability study comparing IL-1ra to IL-1ra linked to XTEN_AM875, as described in Example 22. Samples of IL-1ra and the IL-1ra linked to XTEN were incubated at 25° C. and 85° C. for 15 min, at which time any insoluble protein was rapidly removed by centrifugation. The soluble fraction was then analyzed by SDS-PAGE as shown in FIG. 18, and shows that only IL-1ra-XTEN remained soluble after heating, while, in contrast, recombinant IL-1ra (without XTEN as a fusion partner) was completely precipitated after heating.

[0050] FIG. 19 shows the results of an IL-1ra receptor binding assay performed on the samples shown in FIG. 19. As described in Example 22, the recombinant IL-1ra, which was fully denatured by heat treatment, retained less than 0.1% of its receptor activity following heat treatment. However, IL-1ra linked to XTEN retained approximately 40% of its receptor binding activity.

[0051] FIG. 20 shows the pharmacokinetic profile (plasma concentrations) after single subcutaneous doses of three different BPXTEN compositions of IL-1ra linked to different XTEN sequences, separately administered subcutaneously to cynomolgus monkeys, as described in Example 24.

[0052] FIG. 21 shows body weight results from a pharmacodynamic and metabolic study using a combination of two fusion proteins emulating a BCXTEN composition; i.e., glucagon linked to Y288 (Gcg-XTEN) and exendin-4 linked to AE864 (Ex4-XTEN) combination efficacy in a diet-induced obesity model in mice (see Example 25 for experimental details). The graph shows change in body weight in Diet-Induced Obese mice over the course of 28 days continuous drug administration. Values shown are the average +/−SEM of 10 animals per group (20 animals in the placebo group).

[0053] FIG. 22 shows change in fasting glucose levels from a pharmacodynamic and metabolic study using single and combinations of two fusion proteins emulating a BCXTEN composition; i.e., glucagon linked to Y288 (Gcg-XTEN) and exendin-4 linked to AE864 (Ex4-XTEN) in a diet-induced obesity model in mice (see Example 26 for experimental details). Groups are as follows: Gr. 1 Tris Vehicle; Gr. 2 Ex4-AE576, 10 mg/kg; Gr. 3 Ex4-AE576, 20 mg/kg; Gr. 4 Vehicle, 50% DMSO; Gr. 5 Exenatide, 30 μg/kg/day; Gr. 6 Exenatide, 30 uL/kg/day+Gcg-Y288 20 μg/kg; Gr. 7 Gcg-Y288, 20 mg/kg; Gr. 8 Gcg-Y288, 40 mg/kg; Gr. 9 Ex4-AE576 10 mg/kg+Gcg-Y288 20 μg/kg; Gr. 10 Gcg-Y288 40 μg/kg+Ex4-AE576 20 mg/kg. The graph shows the change in fasting blood glucose levels in Diet-Induced Obese mice over the course of 28 days continuous drug administration. Values shown are the average +/−SEM of 10 animals per group (20 animals in the placebo group).

[0054] FIG. 23 shows change in lipid levels from a pharmacodynamic and metabolic study using a combination of two fusion proteins emulating a BCXTEN composition; i.e., glucagon linked to Y288 (Gcg-XTEN) and exendin-4 linked to AE864 (Ex4-XTEN) combination efficacy in a diet-induced obesity model in mice (see Example 25 for experimental details). The graphs show the triglyceride and cholesterol levels in Diet-Induced Obese mice after 28 days continuous drug administration. Values shown are the average +/−SEM of 10 animals per group.

[0055] FIG. 24 shows the pharmacokinetic profile (plasma concentrations) in cynomolgus monkeys after single doses of different compositions of GFP linked to unstructured polypeptides of varying length, administered either subcutaneously or intravenously, as described in Example 20. The compositions were GFP-L288, GFP-L576, GPF-XTEN_AF576, GFP-Y576 and XTEN_AD836-GFP. Blood samples were analyzed at various times after injection and the concentration of GFP in plasma was measured by ELISA using a polyclonal antibody against GFP for capture and a biotinylated preparation of the same polyclonal antibody for detection. Results are presented as the plasma concentration versus time (h) after dosing and show, in particular, a considerable increase in half-life for the XTEN_AD836-GFP, the composition with the longest sequence length of XTEN. The construct with the shortest sequence length, the GF-L288 had the shortest half-life.

[0056] FIG. 25 shows results of a of a size exclusion chromatography analysis of glucagon-XTEN construct samples measured against protein standards of known molecular weight, with the graph output as absorbance versus retention volume, as described in Example 19. The glucagon-XTEN constructs are 1) glucagon-Y288; 2) glucagonY-144; 3) glucagon-Y72; and 4) glucagon-Y36. The results indicate an increase in apparent molecular weight with increasing length of XTEN moiety.

[0057] FIG. 26 shows the near UV circular dichroism spectrum of Ex4-XTEN_AE864, performed as described in Example 27.

[0058] FIG. 27 shows the graphic output of subsequence scores per 36-mer blocks across an AE864 XTEN, as described in Example 28.

[0059] FIG. 28 shows the graphic output of subsequence scores per 36-mer blocks across an AG864 XTEN, as described in Example 28.

### DETAILED DESCRIPTION OF THE INVENTION

[0060] Before the embodiments of the invention are described, it is to be understood that such embodiments are provided by way of example only, and that various alternatives to the embodiments of the invention described herein may be employed in practicing the invention. Numerous variations, changes, and substitutions will now occur to those skilled in the art without departing from the invention.

[0061] Unless otherwise defined, all technical and scientific terms used herein have the same meaning as commonly understood by one of ordinary skill in the art to which this invention belongs. Although methods and materials similar or equivalent to those described herein can be used in the practice or testing of the present invention, suitable methods and materials are described below. In case of conflict, the patent specification, including definitions, will control. In addition, the materials, methods, and examples are illustrative only and not intended to be limiting. Numerous variations, changes, and substitutions will now occur to those skilled in the art without departing from the invention.

### DEFINITIONS

[0062] In the context of the present application, the following terms have the meanings ascribed to them unless specified otherwise.

[0063] As used in the specification and claims, the singular forms “a”, “an” and “the” include plural references unless the context clearly dictates otherwise. For example, the term “a cell” includes a plurality of cells, including mixtures thereof.

[0064] The terms “polypeptide”, “peptide”, and “protein” are used interchangeably herein to refer to polymers of amino acids of any length. The polymer may be linear or branched, it may comprise modified amino acids, and it may be interrupted by non-amino acids. The terms also encompass an amino acid polymer that has been modified, for example, by disulfide bond formation, glycosylation, lipidation, acetylation, phosphorylation, or any other manipulation, such as conjugation with a labeling component.

[0065] The term “amino acid” refers to either natural and/or unnatural or synthetic amino acids, including but not limited to both the D or L optical isomers, and amino acid analogs and peptidomimetics. Standard single or three letter codes are used to designate amino acids.

[0066] The term “natural L-amino acid” means the L optical isomer forms of glycine (G), proline (P), alanine (A), valine (V), leucine (L), isoleucine (I), methionine (M), cysteine (C), phenylalanine (F), tyrosine (Y), tryptophan (W), histidine (H), lysine (K), arginine (R), glutamine (Q), asparagine (N), glutamic acid (E), aspartic acid (D), serine (S), and threonine (T).

[0067] The term “non-naturally occurring,” as applied to sequences and as used herein, means polypeptide or polynucleotide sequences that do not have a counterpart to, are not complementary to, or do not have a high degree of homology with a wild-type or naturally-occurring sequence found in a mammal. As used herein, “non-naturally occurring” is not intended to distinguish recombinant sequences from wild-type sequences. For example, a non-naturally occurring polypeptide may share no more than 99%, 98%, 95%, 90%, 80%, 70%, 60%, 50% or even less amino acid sequence identity as compared to the corresponding natural sequence when suitably aligned.

[0068] The terms “hydrophilic” and “hydrophobic” refer to the degree of affinity that a substance has with water. A hydrophilic substance has a strong affinity for water, tending to dissolve in, mix with, or be wetted by water, while a hydrophobic substance substantially lacks affinity for water, tending to repel and not absorb water and tending not to dissolve in or mix with or be wetted by water. Amino acids can be characterized based on their hydrophobicity. A number of scales have been developed. An example is a scale developed by Levitt, M, et al., J Mol Biol (1976) 104:59, which is listed in Hopp, T P, et al., Proc Natl Acad Sci USA (1981) 78:3824. Examples of “hydrophilic amino acids” are arginine, lysine, threonine, alanine, asparagine, and glutamine. Of particular interest are the hydrophilic amino acids aspartate, glutamate, and serine, and glycine. Examples of “hydrophobic amino acids” are tryptophan, tyrosine, phenylalanine, methionine, leucine, isoleucine, and valine.

[0069] As applied to biologically active proteins, a “fragment” is a truncated form of a native biologically active protein that retains at least a portion of the therapeutic and/or biological activity. A “variant” is a protein with sequence homology to the native biologically active protein that retains at least a portion of the therapeutic and/or biological activities of the biologically active protein. For example, a variant protein may share at least 70%, 75%, 80%, 85%, 90%, 95%, 96%, 97%, 98% or 99% amino acid sequence identity with the reference biologically active protein. As used herein, the term “biologically active protein moiety” includes proteins modified deliberately, as for example, by site directed mutagenesis, insertions, or accidentally through mutations.

[0070] The term “sequence variant” means polypeptides that have been modified compared to their native or original sequence by one or more amino acid insertions, deletions, or substitutions. Insertions may be located at either or both termini of the protein, and/or may be positioned within internal regions of the amino acid sequence. A non-limiting example would be insertion of an XTEN sequence within the sequence of the biologically-active payload protein. In deletion variants, one or more amino acid residues in a polypeptide as described herein are removed. Deletion variants, therefore, include all fragments of a payload polypeptide sequence. In substitution variants, one or more amino acid residues of a polypeptide are removed and replaced with alternative residues. In one aspect, the substitutions are conservative in nature and conservative substitutions of this type are well known in the art.

[0071] As used herein, “internal XTEN” refers to XTEN sequences that have been inserted into the sequence of the biologically active protein. Internal XTENs can be constructed by insertion of an XTEN sequence into the sequence of a biologically active protein, either by insertion between two adjacent amino acids or wherein XTEN replaces a partial, internal sequence of the biologically active protein.

[0072] As used herein, “terminal XTEN” refers to XTEN sequences that have been fused to or in the N- or C-terminus of the biologically active protein or to a proteolytic cleavage sequence at the N- or C-terminus of the biologically active protein. Terminal XTENs can be fused to the native termini of the biologically active protein. Alternatively, terminal XTENs can replace a terminal sequence of the biologically active protein.

[0073] The term “XTEN release site” refers to a cleavage sequence in fusion proteins that can be recognized and cleaved by a mammalian protease, effecting release of an XTEN or a portion of an XTEN from the fusion protein. As used herein, “mammalian protease” means a protease that normally exists in the body fluids, cells or tissues of a mammal. XTEN release sites can be engineered to be cleaved by various mammalian proteases (a.k.a. “XTEN release proteases”) such as FXIa, FXIIa, kallikrein, FVIIIa, FVIIIa, FXa, FIIa (thrombin), Elastase-2, MMP-12, MMP13, MMP-17, MMP-20, or any protease that is present during a clotting event.

[0074] A “host cell” includes an individual cell or cell culture which can be or has been a recipient for the subject vectors. Host cells include progeny of a single host cell. The progeny may not necessarily be completely identical (in morphology or in genomic of total DNA complement) to the original parent cell due to natural, accidental, or deliberate mutation. A host cell includes cells transfected in vivo with a vector of this invention.

[0075] As used herein, an “antibody” refers to a protein consisting of one or more polypeptides substantially encoded by immunoglobulin genes or fragments of immunoglobulin genes, and includes full-length dimeric antibodies or antibody fragments capable of binding a target antigen of interest. Antibody fragments include CDR regions, single chain antibody molecules (scFv), Fd, and domain antibodies (dAb), The recognized immunoglobulin genes include the kappa, lambda, alpha, gamma, delta, epsilon and mu constant region genes, as well as myriad immunoglobulin variable region genes. Light chains are classified as either kappa or lambda. Heavy chains are classified as gamma, mu, alpha, delta, or epsilon, which in turn define the immunoglobulin classes, IgG, IgM, IgA, IgD and IgE, respectively.

[0076] A “host cell” includes an individual cell or cell culture which can be or has been a recipient for the subject vectors. Host cells include progeny of a single host cell. The progeny may not necessarily be completely identical (in morphology or in genomic of total DNA complement) to the original parent cell due to natural, accidental, or deliberate mutation. A host cell includes cells transfected in vivo with a vector of this invention.

[0077] “Isolated,” when used to describe the various polypeptides or fusion proteins disclosed herein, means polypeptide that has been identified and separated and/or recovered from a component of its natural environment. Contaminant components of its natural environment are materials that would typically interfere with diagnostic or therapeutic uses for the polypeptide, and may include enzymes, hormones, and other proteinaceous or non-proteinaceous solutes. As is apparent to those of skill in the art, a non-naturally occurring polynucleotide, peptide, polypeptide, protein, antibody, or fragments thereof, does not require “isolation” to distinguish it from its naturally occurring counterpart. In addition, a “concentrated”, “separated” or “diluted” polynucleotide, peptide, polypeptide, protein, antibody, or fragments thereof, is distinguishable from its naturally occurring counterpart in that the concentration or number of molecules per volume is generally greater than that of its naturally occurring counterpart. In general, a polypeptide made by recombinant means and expressed in a host cell is considered to be “isolated.”

[0078] An “isolated” polynucleotide or polypeptide-encoding nucleic acid or other polypeptide-encoding nucleic acid is a nucleic acid molecule that is identified and separated from at least one contaminant nucleic acid molecule with which it is ordinarily associated in the natural source of the polypeptide-encoding nucleic acid. An isolated polypeptide-encoding nucleic acid molecule is other than in the form or setting in which it is found in nature. Isolated polypeptide-encoding nucleic acid molecules therefore are distinguished from the specific polypeptide-encoding nucleic acid molecule as it exists in natural cells. However, an isolated polypeptide-encoding nucleic acid molecule includes polypeptide-encoding nucleic acid molecules contained in cells that ordinarily express the polypeptide where, for example, the nucleic acid molecule is in a chromosomal or extra-chromosomal location different from that of natural cells.

[0079] A “chimeric” protein contains at least one fusion polypeptide comprising regions in a different position in the sequence than that which occurs in nature. The regions may normally exist in separate proteins and are brought together in the fusion polypeptide; or they may normally exist in the same protein but are placed in a new arrangement in the fusion polypeptide. A chimeric protein may be created, for example, by chemical synthesis, or by creating and translating a polynucleotide in which the peptide regions are encoded in the desired relationship.

[0080] “Conjugated”, “linked,” “fused,” and “fusion” are used interchangeably herein. These terms refer to the joining together of two more chemical elements or components, by whatever means including chemical conjugation or recombinant means. For example, a promoter or enhancer is operably linked to a coding sequence if it affects the transcription of the sequence. Generally, “operably linked” means that the DNA sequences being linked are contiguous, and in reading phase or in-frame. An “in-frame fusion” refers to the joining of two or more open reading frames (ORFs) to form a continuous longer ORF, in a manner that maintains the correct reading frame of the original ORFs. Thus, the resulting recombinant fusion protein is a single protein containing two ore more segments that correspond to polypeptides encoded by the original ORFs (which segments are not normally so joined in nature).

[0081] In the context of polypeptides, a “linear sequence” or a “sequence” is an order of amino acids in a polypeptide in an amino to carboxyl terminus direction in which residues that neighbor each other in the sequence are contiguous in the primary structure of the polypeptide. A “partial sequence” is a linear sequence of part of a polypeptide which is known to comprise additional residues in one or both directions.

[0082] “Heterologous” means derived from a genotypically distinct entity from the rest of the entity to which it is being compared. For example, a glycine rich sequence removed from its native coding sequence and operatively linked to a coding sequence other than the native sequence is a heterologous glycine rich sequence. The term “heterologous” as applied to a polynucleotide, a polypeptide, means that the polynucleotide or polypeptide is derived from a genotypically distinct entity from that of the rest of the entity to which it is being compared.

[0083] The terms “polynucleotides”, “nucleic acids”, “nucleotides” and “oligonucleotides” are used interchangeably. They refer to a polymeric form of nucleotides of any length, either deoxyribonucleotides or ribonucleotides, or analogs thereof. Polynucleotides may have any three-dimensional structure, and may perform any function, known or unknown. The following are non-limiting examples of polynucleotides: coding or non-coding regions of a gene or gene fragment, loci (locus) defined from linkage analysis, exons, introns, messenger RNA (mRNA), transfer RNA, ribosomal RNA, ribozymes, cDNA, recombinant polynucleotides, branched polynucleotides, plasmids, vectors, isolated DNA of any sequence, isolated RNA of any sequence, nucleic acid probes, and primers. A polynucleotide may comprise modified nucleotides, such as methylated nucleotides and nucleotide analogs. If present, modifications to the nucleotide structure may be imparted before or after assembly of the polymer. The sequence of nucleotides may be interrupted by non-nucleotide components. A polynucleotide may be further modified after polymerization, such as by conjugation with a labeling component.

[0084] The term “complement of a polynucleotide” denotes a polynucleotide molecule having a complementary base sequence and reverse orientation as compared to a reference sequence, such that it could hybridize with a reference sequence with complete fidelity.

[0085] “Recombinant” as applied to a polynucleotide means that the polynucleotide is the product of various combinations of in vitro cloning, restriction and/or ligation steps, and other procedures that result in a construct that can potentially be expressed in a host cell.

[0086] The terms “gene” or “gene fragment” are used interchangeably herein. They refer to a polynucleotide containing at least one open reading frame that is capable of encoding a particular protein after being transcribed and translated. A gene or gene fragment may be genomic or cDNA, as long as the polynucleotide contains at least one open reading frame, which may cover the entire coding region or a segment thereof. A “fusion gene” is a gene composed of at least two heterologous polynucleotides that are linked together.

[0087] “Homology” or “homologous” refers to sequence similarity or interchangeability between two or more polynucleotide sequences or two or more polypeptide sequences. When using a program such as BestFit to determine sequence identity, similarity or homology between two different amino acid sequences, the default settings may be used, or an appropriate scoring matrix, such as blosum45 or blosum80, may be selected to optimize identity, similarity or homology scores. Preferably, polynucleotides that are homologous are those which hybridize under stringent conditions as defined herein and have at least 70%, preferably at least 80%, more preferably at least 90%, more preferably 95%, more preferably 97%, more preferably 98%, and even more preferably 99% sequence identity to those sequences.

[0088] “Ligation” refers to the process of forming phosphodiester bonds between two nucleic acid fragments or genes, linking them together. To ligate the DNA fragments or genes together, the ends of the DNA must be compatible with each other. In some cases, the ends will be directly compatible after endonuclease digestion. However, it may be necessary to first convert the staggered ends commonly produced after endonuclease digestion to blunt ends to make them compatible for ligation.

[0089] The terms “stringent conditions” or “stringent hybridization conditions” includes reference to conditions under which a polynucleotide will hybridize to its target sequence, to a detectably greater degree than other sequences (e.g., at least 2-fold over background). Generally, stringency of hybridization is expressed, in part, with reference to the temperature and salt concentration under which the wash step is carried out. Typically, stringent conditions will be those in which the salt concentration is less than about 1.5 M Na ion, typically about 0.01 to 1.0 M Na ion concentration (or other salts) at pH 7.0 to 8.3 and the temperature is at least about 30° C. for short polynucleotides (e.g., 10 to 50 nucleotides) and at least about 60° C. for long polynucleotides (e.g., greater than 50 nucleotides)—for example, “stringent conditions” can include hybridization in 50% formamide, 1 M NaCl, 1% SDS at 37° C., and three washes for 15 min each in 0.1×SSC/1% SDS at 60° C. to 65° C. Alternatively, temperatures of about 65° C., 60° C., 55° C., or 42° C. may be used. SSC concentration may be varied from about 0.1 to 2×SSC, with SDS being present at about 0.1%. Such wash temperatures are typically selected to be about 5° C. to 20° C. lower than the thermal melting point for the specific sequence at a defined ionic strength and pH. The Tm is the temperature (under defined ionic strength and pH) at which 50% of the target sequence hybridizes to a perfectly matched probe. An equation for calculating Tm and conditions for nucleic acid hybridization are well known and can be found in Sambrook, J. et al., “Molecular Cloning: A Laboratory Manual,” 3rd edition, Cold Spring Harbor Laboratory Press, 2001. Typically, blocking reagents are used to block non-specific hybridization. Such blocking reagents include, for instance, sheared and denatured salmon sperm DNA at about 100-200 μg/ml. Organic solvent, such as formamide at a concentration of about 35-50% v/v, may also be used under particular circumstances, such as for RNA:DNA hybridizations. Useful variations on these wash conditions will be readily apparent to those of ordinary skill in the art.

[0090] The terms “percent identity” and “% identity,” as applied to polynucleotide sequences, refer to the percentage of residue matches between at least two polynucleotide sequences aligned using a standardized algorithm. Such an algorithm may insert, in a standardized and reproducible way, gaps in the sequences being compared in order to optimize alignment between two sequences, and therefore achieve a more meaningful comparison of the two sequences. Percent identity may be measured over the length of an entire defined polynucleotide sequence, or may be measured over a shorter length, for example, over the length of a fragment taken from a larger, defined polynucleotide sequence, for instance, a fragment of at least 45, at least 60, at least 90, at least 120, at least 150, at least 210 or at least 450 contiguous residues. Such lengths are exemplary only, and it is understood that any fragment length supported by the sequences shown herein, in the tables, figures or Sequence Listing, may be used to describe a length over which percentage identity may be measured.

[0091] “Percent (%) amino acid sequence identity,” with respect to the polypeptide sequences identified herein, is defined as the percentage of amino acid residues in a query sequence that are identical with the amino acid residues of a second, reference polypeptide sequence or a portion thereof, after aligning the sequences and introducing gaps, if necessary, to achieve the maximum percent sequence identity, and not considering any conservative substitutions as part of the sequence identity. Alignment for purposes of determining percent amino acid sequence identity can be achieved in various ways that are within the skill in the art, for instance, using publicly available computer software such as BLAST, BLAST-2, ALIGN or Megalign (DNASTAR) software. Those skilled in the art can determine appropriate parameters for measuring alignment, including any algorithms needed to achieve maximal alignment over the full length of the sequences being compared. Percent identity may be measured over the length of an entire defined polypeptide sequence, for example, as defined by a particular SEQ ID number, or may be measured over a shorter length, for example, over the length of a fragment taken from a larger, defined polypeptide sequence, for instance, a fragment of at least 15, at least 20, at least 30, at least 40, at least 50, at least 70 or at least 150 contiguous residues. Such lengths are exemplary only, and it is understood that any fragment length supported by the sequences shown herein, in the tables, figures or Sequence Listing, may be used to describe a length over which percentage identity may be measured.

[0092] The term “non-repetitiveness” as used herein in the context of a polypeptide refers to a lack or limited degree of internal homology in a peptide or polypeptide sequence. The term “substantially non-repetitive” can mean, for example, that there are few or no instances of four contiguous amino acids in the sequence that are identical amino acid types or that the polypeptide has a subsequence score (defined infra) of 3 or less or that there isn't a pattern in the order, from N- to C-terminus, of the sequence motifs that constitute the polypeptide sequence. The term “repetitiveness” as used herein in the context of a polypeptide refers to the degree of internal homology in a peptide or polypeptide sequence. In contrast, a “repetitive” sequence may contain multiple identical copies of short amino acid sequences. For instance, a polypeptide sequence of interest may be divided into n-mer sequences and the number of identical sequences can be counted over the length of the polypeptide or averaged over shorter lengths called “blocks.” Highly repetitive sequences contain a large fraction of identical sequences while non-repetitive sequences contain few identical sequences. In the context of a polypeptide, a sequence can contain multiple copies of shorter sequences of defined or variable length, or motifs, in which the motifs themselves have non-repetitive sequences, rendering the full-length polypeptide substantially non-repetitive. “Repetitiveness” used in the context of polynucleotide sequences refers to the degree of internal homology in the sequence such as, for example, the frequency of identical nucleotide sequences of a given length. Repetitiveness can, for example, be measured by analyzing the frequency of identical sequences.

[0093] A “vector” is a nucleic acid molecule, preferably self-replicating in an appropriate host, which transfers an inserted nucleic acid molecule into and/or between host cells. The term includes vectors that function primarily for insertion of DNA or RNA into a cell, replication of vectors that function primarily for the replication of DNA or RNA, and expression vectors that function for transcription and/or translation of the DNA or RNA. Also included are vectors that provide more than one of the above functions. An “expression vector” is a polynucleotide which, when introduced into an appropriate host cell, can be transcribed and translated into a polypeptide(s). An “expression system” usually connotes a suitable host cell comprised of an expression vector that can function to yield a desired expression product.

[0094] “Serum degradation resistance,” as applied to a polypeptide, refers to the ability of the polypeptides to withstand degradation in blood or components thereof, which typically involves proteases in the serum or plasma. The serum degradation resistance can be measured by combining the protein with human (or mouse, rat, monkey, as appropriate) serum or plasma, typically for a range of days (e.g. 0.25, 0.5, 1, 2, 4, 8, 16 days), typically at about 37° C. The samples for these time points can be run on a Western blot assay and the protein is detected with an antibody. The antibody can be to a tag in the protein. If the protein shows a single band on the western, where the protein's size is identical to that of the injected protein, then no degradation has occurred. In this exemplary method, the time point where 50% of the protein is degraded, as judged by Western blots or equivalent techniques, is the serum degradation half-life or “serum half-life” of the protein.

[0095] The term “t_{1/2}” as used herein means the terminal half-life calculated as ln(2)/Kₑ₁. Kₑ₁ is the terminal elimination rate constant calculated by linear regression of the terminal linear portion of the log concentration vs. time curve. Half-life typically refers to the time required for half the quantity of an administered substance deposited in a living organism to be metabolized or eliminated by normal biological processes. The terms “t_{1/2}”, “terminal half-life”, “elimination half-life” and “circulating half-life” are used interchangeably herein.

[0096] “Active clearance” means the mechanisms by which biologically active protein is removed from the circulation other than by filtration or coagulation, and which includes removal from the circulation mediated by cells, receptors, metabolism, or degradation of the biologically active protein.

[0097] “Apparent molecular weight factor” and “apparent molecular weight” are related terms referring to a measure of the relative increase or decrease in apparent molecular weight exhibited by a particular amino acid sequence. The apparent molecular weight is determined using size exclusion chromatography (SEC) and similar methods compared to globular protein standards and is measured in “apparent kD” units. The apparent molecular weight factor is the ratio between the apparent molecular weight and the actual molecular weight; the latter predicted by adding, based on amino acid composition, the calculated molecular weight of each type of amino acid in the composition or by estimation from comparison to molecular weight standards in an SDS electrophoresis gel.

[0098] The terms “hydrodynamic radius” or “Stokes radius” is the effective radius (Rh in nm) of a molecule in a solution measured by assuming that it is a body moving through the solution and resisted by the solution's viscosity. In the embodiments of the invention, the hydrodynamic radius measurements of the XTEN fusion proteins correlate with the ‘apparent molecular weight factor’, which is a more intuitive measure. The “hydrodynamic radius” of a protein affects its rate of diffusion in aqueous solution as well as its ability to migrate in gels of macromolecules. The hydrodynamic radius of a protein is determined by its molecular weight as well as by its structure, including shape and compactness. Methods for determining the hydrodynamic radius are well known in the art, such as by the use of size exclusion chromatography (SEC), as described in U.S. Pat. Nos. 6,406,632 and 7,294,513. Most proteins have globular structure, which is the most compact three-dimensional structure a protein can have with the smallest hydrodynamic radius. Some proteins adopt a random and open, unstructured, or ‘linear’ conformation and as a result have a much larger hydrodynamic radius compared to typical globular proteins of similar molecular weight.

[0099] “Physiological conditions” refer to a set of conditions in a living host as well as in vitro conditions, including temperature, salt concentration, pH, that mimic those conditions of a living subject. A host of physiologically relevant conditions for use in in vitro assays have been established. Generally, a physiological buffer contains a physiological concentration of salt and is adjusted to a neutral pH ranging from about 6.5 to about 7.8, and preferably from about 7.0 to about 7.5. A variety of physiological buffers is listed in Sambrook et al. (1989). Physiologically relevant temperature ranges from about 25° C. to about 38° C., and preferably from about 35° C. to about 37° C.

[0100] A “reactive group” is a chemical structure that can be coupled to a second reactive group. Examples for reactive groups are amino groups, carboxyl groups, sulfhydryl groups, hydroxyl groups, aldehyde groups, azide groups. Some reactive groups can be activated to facilitate coupling with a second reactive group. Examples for activation are the reaction of a carboxyl group with carbodiimide, the conversion of a carboxyl group into an activated ester, or the conversion of a carboxyl group into an azide function.

[0101] “Controlled release agent”, “slow release agent”, “depot formulation” or “sustained release agent” are used interchangeably to refer to an agent capable of extending the duration of release of a polypeptide of the invention relative to the duration of release when the polypeptide is administered in the absence of agent. Different embodiments of the present invention may have different release rates, resulting in different therapeutic amounts.

[0102] The terms “antigen”, “target antigen” or “immunogen” are used interchangeably herein to refer to the structure or binding determinant that an antibody fragment or an antibody fragment-based therapeutic binds to or has specificity against.

[0103] The term “payload” as used herein refers to a protein or peptide sequence that has biological or therapeutic activity; the counterpart to the pharmacophore of small molecules. Examples of payloads include, but are not limited to, cytokines, enzymes, hormones and blood and growth factors. Payloads can further comprise genetically fused or chemically conjugated moieties such as chemotherapeutic agents, antiviral compounds, toxins, or contrast agents. These conjugated moieties can be joined to the rest of the polypeptide via a linker which may be cleavable or non-cleavable.

[0104] The term “antagonist”, as used herein, includes any molecule that partially or fully blocks, inhibits, or neutralizes a biological activity of a native polypeptide disclosed herein. Methods for identifying antagonists of a polypeptide may comprise contacting a native polypeptide with a candidate antagonist molecule and measuring a detectable change in one or more biological activities normally associated with the native polypeptide. In the context of the present invention, antagonists may include proteins, nucleic acids, carbohydrates, antibodies or any other molecules that decrease the effect of a biologically active protein.

[0105] The term “agonist” is used in the broadest sense and includes any molecule that mimics a biological activity of a native polypeptide disclosed herein. Suitable agonist molecules specifically include agonist antibodies or antibody fragments, fragments or amino acid sequence variants of native polypeptides, peptides, small organic molecules, etc. Methods for identifying agonists of a native polypeptide may comprise contacting a native polypeptide with a candidate agonist molecule and measuring a detectable change in one or more biological activities normally associated with the native polypeptide.

[0106] “Activity” for the purposes herein refers to an action or effect of a component of a fusion protein consistent with that of the corresponding native biologically active protein, wherein “biological” activity” refers to an in vitro or in vivo biological function or effect, including but not limited to receptor binding, agonist activity, or a cellular or physiologic response.

[0107] As used herein, “treat” or “treating,” or “palliating” or “ameliorating” are used interchangeably and mean administering a drug or a biologic to achieve a therapeutic benefit, to cure or reduce the severity of an existing disease, disorder or condition, or to achieve a prophylactic benefit, prevent or reduce the likelihood of onset or severity the occurrence of a disease, disorder or condition. By therapeutic benefit is meant eradication or amelioration of the underlying disorder being treated or one or more of the physiological symptoms associated with the underlying disorder such that an improvement is observed in the subject, notwithstanding that the subject may still be afflicted with the underlying disorder.

[0108] A “therapeutic effect” or “therapeutic benefit,” as used herein, refers to a physiologic effect, including but not limited to the cure, mitigation, amelioration, or prevention of disease in humans or other animals, or to otherwise enhance physical or mental wellbeing of humans or animals, caused by a fusion polypeptide of the invention other than the ability to induce the production of an antibody against an antigenic epitope possessed by the biologically active protein. For prophylactic benefit, the compositions may be administered to a subject at risk of developing a particular disease, or to a subject reporting one or more of the physiological symptoms of a disease, even though a diagnosis of this disease may not have been made.

[0109] The terms “therapeutically effective amount” and “therapeutically effective dose”, as used herein, refer to an amount of a drug or a biologically active protein, either alone or as a part of a fusion protein composition, that is capable of having any detectable, beneficial effect on any symptom, aspect, measured parameter or characteristics of a disease state or condition when administered in one or repeated doses to a subject. Such effect need not be absolute to be beneficial. Determination of a therapeutically effective amount is well within the capability of those skilled in the art, especially in light of the detailed disclosure provided herein.

[0110] The term “therapeutically effective dose regimen”, as used herein, refers to a schedule for consecutively administered multiple doses (i.e., at least two or more) of a biologically active protein, either alone or as a part of a fusion protein composition, wherein the doses are given in therapeutically effective amounts to result in sustained beneficial effect on any symptom, aspect, measured parameter or characteristics of a disease state or condition.

[0111] The terms “prevention”, “prevent”, “preventing”, “suppression”, “suppress”, “suppressing”, “inhibit” and “inhibition” as used herein refer to a course of action, including administering a compound or composition initiated in a manner (e.g., prior to the onset of a clinical symptom of a disease state or condition) so as to prevent, suppress or reduce, either temporarily or permanently, the onset of a clinical manifestation or physiologic parameter of the disease state or condition. Such preventing, suppressing or reducing need not be absolute to be useful.

### I). General Techniques

[0112] The practice of the present invention employs, unless otherwise indicated, conventional techniques of immunology, biochemistry, chemistry, molecular biology, microbiology, cell biology, genomics and recombinant DNA, which are within the skill of the art. See Sambrook, J. et al., “Molecular Cloning: A Laboratory Manual,” 3^{rd} edition, Cold Spring Harbor Laboratory Press, 2001; “Current protocols in molecular biology”, F. M. Ausubel, et al. eds., 1987; the series “Methods in Enzymology,” Academic Press, San Diego, Calif.; “PCR 2: a practical approach”, M. J. MacPherson, B. D. Hames and G. R. Taylor eds., Oxford University Press, 1995; “Antibodies, a laboratory manual” Harlow, E. and Lane, D. eds., Cold Spring Harbor Laboratory, 1988; “Goodman & Gilman's The Pharmacological Basis of Therapeutics,” 11^{th} Edition, McGraw-Hill, 2005; and Freshney, R. I., “Culture of Animal Cells: A Manual of Basic Technique,” 4^{th} edition, John Wiley & Sons, Somerset, N.J., 2000, the contents of which are incorporated in their entirety herein by reference.

### II). Bifunctional Fusion Protein Compositions

[0113] The present invention relates in part to fusion protein compositions and methods of use of fusion proteins for treatment or prevention of metabolic and/or cardiovascular diseases, disorders or conditions.

[0114] In one aspect, the invention provides combinations of a first biologically active protein (hereinafter “BP”) and a second BP covalently linked to one or more extended recombinant polypeptides (hereinafter “XTEN), resulting in a chimeric bifunctional monomeric XTEN fusion protein composition (hereinafter “BMXTEN”). In another aspect, the invention provides fixed compositions of at least two individual fusion proteins, each with a different payload BP linked to one or more XTEN, resulting in a chimeric bifunctional combination XTEN fusion protein composition (hereinafter “BCXTEN”). Collectively, the BMXTEN and BCXTEN are bifunctional XTEN fusion proteins and it is intended that the term “BFXTEN” encompass both forms unless specifically indicated otherwise. Thus, BFXTEN are chimeric polypeptides that comprise one or two payload regions, each comprising a biologically active protein (BP) that mediates one or more biological or therapeutic activities and at least one other region comprising an XTEN polypeptide that is not a biologically active protein and that has an extended, non-repetitive, non-naturally occurring sequence with unstructured characteristics, amongst other properties as described herein.

[0115] (a) Biologically Active Proteins (BP)

[0116] The bifunctional BFXTEN compositions of the invention comprise a first BP and a second BP that is not identical to the first BP. The BP for inclusion in the bifunctional BFXTEN of the invention can include any protein of biologic, therapeutic, or prophylactic interest or function that is useful for preventing, treating, mediating, or ameliorating a metabolic and/or cardiovascular disease, disorder or condition or can prolong the survival of the subject being treated. In one embodiment, the BP incorporated into the subject compositions can be a recombinant polypeptide with a sequence corresponding to a protein found in nature. In another embodiment, the BP can be sequence variants, fragments, homologs, and mimetics of a natural sequence that retain at least a portion of the biological activity of the native BP. It is specifically contemplated that the term “biologically active protein” or “BP” encompasses antibodies and fragments and variants thereof. Table 1 provides a non-limiting list of biologically active proteins that are encompassed by the BFXTEN fusion proteins of the invention. In one embodiment, a BFXTEN fusion protein comprises a first biologically active protein that exhibits at least about 80% sequence identity, or alternatively 81%, 82%, 83%, 84%, 85%, 86%, 87%, 88%, 89%, 90%, 91%, 92%, 93%, 94%, 95%, 96%, 97%, 98% or 99% sequence identity to a protein sequence selected from Table 1, linked to an XTEN (as described more fully below). In another embodiment, the BFXTEN comprises the first biologically active protein of the foregoing embodiment and a second biologically active protein that exhibits at least about 80% sequence identity, or alternatively 81%, 82%, 83%, 84%, 85%, 86%, 87%, 88%, 89%, 90%, 91%, 92%, 93%, 94%, 95%, 96%, 97%, 98% or 99% sequence identity to a protein sequence selected from Table 1, wherein the second biologically active protein is different from the first biologically active protein, resulting in a monomeric fusion protein comprising the two BP linked to one or more XTEN (as described more fully below). In another embodiment, a BFTXEN composition comprises two fusion proteins; a first fusion protein comprising a first BP linked to at least a first XTEN and a second fusion protein comprising a second BP different from the first BP linked to an XTEN that may be identical or may be different from the first XTEN.

[0117] In general, BP will exhibit a binding specificity to a given target or another desired biological characteristic when used in vivo or when utilized in an in vitro assay. For example, the BP can be an agonist, a receptor, a ligand, an antagonist, a hormone, or an antibody or antibody fragment. Of particular interest are BP used or known to be useful for a metabolic and/or cardiovascular disease or disorder wherein the native BP have a relatively short terminal half-life and for which an enhancement of a pharmacokinetic parameter or the combination with a second BP would permit less frequent dosing or an enhanced pharmacologic effect. Also of interest are BP that have a narrow therapeutic window between the minimum effective dose or blood concentration (Cₘᵢₙ) and the maximum tolerated dose or blood concentration (Cₘₐₓ).

[0118] In another embodiment, the invention provides bifunctional BFXTEN compositions wherein one BP can be an antigen binding moiety, such as an antibody or antibody fragment. Many forms of antibody fragments are known in the art and encompassed herein. Antibody fragments comprise only a portion of an intact antibody, generally including at least a portion of an antigen binding site of the intact antibody that retains the ability to bind antigen. Examples of monomeric antibody fragments encompassed by the present definition include: (i) isolated CDR regions, with or without framework regions; (ii) single chain antibody molecules (scFv) comprising the V_{H} and V_{L} domains of an antibody wherein these domains are present in a single polypeptide chain (Bird et al., Science 242:423-426 (1988), and Huston et al., PNAS (USA) 85:5879-5883 (1988)); (iii) Fd (a fragment consisting of the VH and CH1 domains); and (iv) domain antibodies (dAb), consisting of a V_{H} or V_{L} domain (as described in WO 2007/087673). The methods to make such antibody fragments are well-known in the art, and antigen-binding sequences can be derived from natural or synthetic sources. A library of V_{H} and V_{L} region domains to be screened for binding activity can be a naturally occurring repertoire of immunoglobulin sequences or a synthetic repertoire. A naturally occurring repertoire can be prepared, for example, from immunoglobulin-expressing cells harvested from a mammalian source. Synthetic repertoires of single immunoglobulin variable domains can be prepared by artificially introducing sequence diversity into a cloned variable domain. A library repertoire of V_{H} and V_{L} domains can be screened for desired binding specificity to a specific target by, for example, phage display. Methods for the construction of bacteriophage display libraries and lambda phage expression libraries are well known in the art. In one embodiment, the antigen-binding moiety can have the binding portions of the variable regions of an antibody tight chain and the binding portion of the variable region of an antibody heavy chain. In another embodiment, the antigen-binding moiety can have the binding portions of a first a second variable region of antibody light chains. In another embodiment, the antigen-binding moiety can have the binding portions of the variable region of a first and a second antibody heavy chain. In another embodiment, the antigen-binding moiety is a multimer of antigen-binding fragments, each linked by intervening XTEN sequences of 100-300 amino acid residues. In the foregoing embodiments hereinabove described in this paragraph, the antigen-binding moiety of the BFXTEN composition can be a pharmacologic effector moiety wherein the binding results in an agonist, antagonist, or immune clearance effect, or can be a targeting moiety Wherein the second BP of the BFXTEN composition can be a therapeutic protein, and wherein the targeting by the antigen-binding moiety results in enhanced delivery of the therapeutic protein component of the BFXTEN to a target cell, tissue or organ. In one embodiment, the BFXTEN comprises a BP wherein the BP is a targeting moiety with binding affinity to a cell surface receptor. In one embodiment, the antigen-binding moiety of the BFXTEN fusion protein binds CD3, such as, but not limited to, an anti-CD3 antibody or binding fragment(s) as described in U.S. Pat. Nos. 5,885,573 and 6,491,916.

TABLE 1
Biologically active proteins and corresponding amino acid sequences

| Name of Protein | | SEQ ID |
|---|---|---|
| (Synonym) | Sequence | NO: |
| adrenomedullin | YRQSMNNFQGLRSFGCRFGTCTVQKLAHQIYQFTDKDKDNVAPRSKISPQ | 1 |
| (ADM) | GY | |
| Amylin, rat | KCNTATCATQRLANFLVRSSNNLGPVLPPTNVGSNTY | 2 |
| Amylin, human | [sequence omitted] | 3 |
| Anti-CD3 | See U.S. Pat Nos. 5,885,573 and 6,491,916 | |
| IL1ra (kineret) | MRPSGRKSSKMQAFRIWDVNQKTFYLRNNQLVAGYLQGPNVNLEEKIDV | 4 |
| | VPIEPHALFLGIHGGKMCLSCVKSGDETRLQLEAVNITDLSENRKQDKRFA | |
| | FIRSDSGPTTSFESAACPGWFLCTAMEADQPVSLTNMPDEGVMVTKFYFQ | |
| | EDE | |
| Calcitonin (hCT) | CGNLSTCMLGTYTQDFNKFHTFPQTAIGVGAP | 5 |
| Calcitonin, salmon | CSNLSTCVLGKLSQELHKLQTYPRTNTGSTP | 6 |
| calcitonin gene related | ACDTATCVTHRLAGLLSRSGGVVKNMVPTNVGSKAF | 7 |
| peptide (h-CGRP α) | | |
| calcitonin gene related | ACNTATCVTHRLAGLLSRSGGMVKSNFVPTNVGSKAF | 8 |
| peptide (h-CGRP β) | | |
| FGF-19 | MRSGCVVVHVWILAGLWLAVAGRPLAFSDAGPHVHYGWGDPIRLRHLY | 9 |
| | TSGPHGLSSCFLRIRADGVVDCARGQSAHSLLEIKAVALRTVAIKGVHSVR | |
| | YLCMGADGKMQGLLQYSEEDCAFEEEIRPDGYNVYRSEKHRLPVSLSSA | |
| | KQRQLYKNRGFLPLSHFLPMLPMVPEEPEDLRGHLESDMFSSPLETDSMD | |
| | PFGLVTGLEAVRSPSFEK | |
| FGF-21 | MDSDETGFEHSGLWVSVLAGLLLGACQAHPIPDSSPLLQFGGQVRQRYLY | 10 |
| | TDDAQQTEAHLEIREDGTVGGAADQSPESLLQLKALKPGVIQILGVKTSRF | |
| | LCQRPDGALYGSLHFDPEACSFRELLLEDGYNVYQSEAHGLPLHLPGNKS | |
| | PHRDPAPRGPARFLPLPGLPPALPEPPGILAPQPPDVGSSDPLSMVGPSQGR | |
| | SPSYAS | |
| Gastrin | QLGPQGPPHLVADPSKKQGPWLEEEEEAYGWMDF | 11 |
| Gastric inhibitory | YAEGTFISDYSIAMDKIHQ QDFVNWLLAQKGKKNDWKHNITQ | 12 |
| polypeptide (GIP) | | |
| Ghrelin | GSSFLSPEHQR VQQRKESKKPPAKLQPR | 13 |
| IGF-1 | GPETLCGAELVDALQFVCGDRGFYFNKPTGYGSSSRRAPQTG | 14 |
| | IVDECCFRSCDLRRLEMYCAPLKPAKSA | |
| IGF-2 | AYRPSETLCGGELVDTLQFVCGDRGFYFSRPASRVSRRSRGIVEECCFRSC | 15 |
| | DLALLETYCATPAKSE | |
| INGAP peptide | EESQKKLPSSRITCPQGSVAYGSYCYSLILIPQTWSNAELSCQMHFSGHLAF | 16 |
| (islet neogenesis- | LLSTGEITFVSSLVKNSLTAYQYIWIGLHDPSHGTLPNGSGWKWSSSNVLT | |
| associated protein) | FYNWERNPSIAADRGYCAVLSQKSGFQKWRDFNCENELPYICKFKV | |
| Pramlintide | KCNTATCATNRLANFLVHSSNNFGPILPPTNVGSNTY-H2 | 17 |
| α-natriuretic peptide | SLRRSSCFGGRMDRIGAQSGLGCNSFRY | 18 |
| (ANP) | | |
| β-natriuretic peptide, | SPKMVQGSGGFGRKMDRISSSSGLGCKVLRRH | 19 |
| human (BNP human) | | |
| Brain natriuretic | NSKMAHSSSCFGQKIDRIGAVSRLGCDGLRLF | 20 |
| peptide, Rat: | | |
| (BNP Rat) | | |
| C-type natriuretic | GLSKGCFGLKLDRIGSMSGLGC | 21 |
| peptide (CNP porcine) | | |
| cholecystokinin | MNSGVCLCVLMAVLAAGALTQPVPPADPAGSGLQRAEEAPRRQLRVSQR | 22 |
| (CCK) | TDGESRAHLGALLARYIQQARKAPSGRMSIVKNLQNLDPSHRISDRDYMG | |
| | WMDFGRRSAEEYEYPS | |
| CCK-58 | VSQRTDGESRAHLGALLARYIQQARKAPSGRMSIVKNLQNLDPSHRISDR | 23 |
| | DYMGWMDF | |
| CCK-33 | KAPSGRMSIVKNLQNLDPSHRISDRDYMGWMDF | 24 |
| CCK-8 | DYMGWMDF | 25 |
| CCK-7 | YMGWMDF | 26 |
| CCK-8- | DY(SO3)MGWMDF | 27 |
| Sulfated | | |
| CCK-5 | GWMDF | 28 |
| Exendin-3 | HSDGTFTSDLSKQMEEEAVRLFIEWLKNGGPSSGAPPPS | 29 |
| Exendin-4 | HGEGTFTSDLSKQMEEEAVR LFIEWLKNGGPSSGAPPPS | 30 |
| Gastrin-17 | DPSKKQGPWLEEEEEAYGWMDF | 31 |
| Glucagon | HSQGTFTSDYSKYLDSRRAQDFVQWLMNT | 32 |
| Glucagon-like peptide- | HDEFERHAEGTFTSDVSSTLEGQAALEFIAWLVKGRG | 33 |
| 1 (hGLP-1) (GLP-1; | | |
| 1-37) | | |
| h-GLP-1 (7-36) | HAEGTFTSDVSSYLEGQAALEFIAWLVKGR | 34 |
| h-GLP-1 (7-37) | HAEGTFTSDVSSTLEGQAALEFIAWLVKGRG | 35 |
| GLP-1, frog | HAEGTYTNDVTEYLEEKAAKEFIEWLIKGKPKKIRYS | 36 |
| glucagon-like peptide | HADGSFSDEMNTILDNLAARDFINWLIETKITD | 37 |
| 2 (hGLP-2) | | |
| GLP-2, frog | HAEGTFTNDMTNYLEEKAAKEFVGWLIKGRP-OH | 38 |
| Intermedin (AFP-6) | TQAQULRVGCVLGTCQVQNLSHRLWQLMGPAGRQDSAPVDPSSPHSY | 39 |
| h-Leptin | VPIQKVQDDTKTLIKTIVTRINDISHTQSVSSKQKVTGLDFIPGLHPILTLSK | 40 |
| | MDQTLAVYQQILTSMPSRNVIQISNDLENLRDLLHVLAFSKSCHLPWASG | |
| | LETLDSLGGVLEASGYSTEVVALSRLQGSLQDMLWQLDLSPGC | |
| Neuromedin | YFLFRPRN | 41 |
| (U-8, porcine) | | |
| Neuromedin (U-9) | GYFLFRPRN | 42 |
| neuromedin (U25, | FRVDEEFQSPFASQSRGYFLFRPRN | 43 |
| human) | | |
| Neuromedin (U25, | FKVDEEFQGPIVSQNRRYFLFRPRN | 44 |
| pig) | | |
| Neuromedin S, human | ILQRGSGTAAVDFTKKDHTATWGRPFFLFRPRN | 45 |
| Neuromedin U, rat | YKVNEYQGPVAPSGGFFLFRPRN | 46 |
| oxyntomodulin OXM) | HSQGTFTSDYSKYLDSRRAQDFVQWLMNTKRNRNNIA | 47 |
| peptide YY (PYY) | YPIKPEAPGEDASPEELNRYYASLRHYLNLVTRQRY | 48 |
| urodilatin | TAPRSLRRSSCFGGRMDRIGAQSGLGCNSFRY | 49 |
| Urocortin (Ucn-1) | DNPSLSIDLTFHLLRTLLELARTQSQRERAEQNRIIFDSV | 50 |
| Urocortin (Ucn-2) | IVLSLDVPIGLLQILLEQARARAAREQATTNARILARVGHC | 51 |
| Urocortin (Ucn-3) | FTLSLDVPTNIMNLLFNIAKAKNLRAQAAANAHLMAQI | 52 |

[0119] “Adrenomedullin” or “ADM” means the human adrenomedulin peptide hormone and species and non-natural sequence variants having at least a portion of the biological activity of mature ADM. ADM is generated from a 185 amino acid preprohormone through consecutive enzymatic cleavage and amidation, resulting in a 52 amino acid bioactive peptide with a measured plasma half-life of 22 min. ADM-containing fusion proteins of the invention may find particular use in diabetes for stimulatory effects on insulin secretion from islet cells for glucose regulation or in subjects with sustained hypotension. The complete genomic infrastructure for human AM has been reported (Ishimitsu, et al., Biochem. Biophys. Res. Commun 203:631-639 (1994)), and analogs of ADM peptides have been cloned, as described in U.S. Pat. No. 6,320,022.

[0120] “Amylin” means the human peptide hormone referred to as amylin, pramlintide, species variations thereof, as described in U.S. Pat. No. 5,234,906, and non-natural sequence variants having at least a portion of the biological activity of mature amylin. Amylin is a 37-amino acid polypeptide hormone co-secreted with insulin by pancreatic beta cells in response to nutrient intake (Koda et al., Lancet 339:1179-1180. 1992), and has been reported to modulate several key pathways of carbohydrate metabolism, including incorporation of glucose into glycogen. Amylin-containing fusion proteins of the invention may find particular use in diabetes and obesity for regulating gastric emptying, suppressing glucagon secretion and food intake, thereby affecting the rate of glucose appearance in the circulation. Thus, the fusion proteins may complement the action of insulin, which regulates the at of glucose disappearance from the circulation and its uptake by peripheral tissues. Amylin analogues have been cloned, as described in U.S. Pat. Nos. 5,686,411 and 7,271,238. Amylin mimetics can be created that retain biologic activity. For example, pramlintide has the sequence KCNTATCATNRLANFLVHSSNNFGPILPPTNVGSNTY (SEQ ID NO: 53), wherein amino acids from the rat amylin sequence are substituted for amino acids in the human amylin sequence. In one embodiment, the invention contemplates fusion proteins comprising amylin mimetics of formula

[0121] KCNTATCATXRLANFLVHSSNNFGZILZZTNVGSNTY (SEQ ID NO: 54)

wherein X is independently N or Q and Z is independently S, P or G. In one embodiment, the amylin mimetic incorporated into a BFXTEN has the sequence KCNTATCATNRLANFLVHSSNNFGGILGGTNVGSNTY (SEQ ID NO: 55). In another embodiment, wherein the amylin mimetic is used at the C-terminus of the BFXTEN, the mimetic has the sequence KCNTATCATNRLANFLVHSSNNFGGILGGTNVGSNTY(NH2) (SEQ ID NO: 56)

[0122] “Anti-CD3” means the monoclonal antibody against the T cell surface protein CD3, species and sequence variants, and fragments thereof, including OKT3 (also called muromonab) and humanized anti-CD3 monoclonal antibody (hOKT31(Ala-Ala))(K C Herold et al., New England Journal of Medicine 346:1692-1698. 2002) Anti-CD3 prevents T-cell activation and proliferation by binding the T-cell receptor complex present on all differentiated T cells. Anti-CD3-containing fusion proteins of the invention may find particular use to slow new-onset Type 1 diabetes, including use of the anti-CD3 as a therapeutic effector as well as a targeting moiety for a second therapeutic BP in the BFXTEN composition. The sequences for the variable region and the creation of anti-CD3 have been described in U.S. Pat. Nos. 5,885,573 and 6,491,916.

[0123] “Calcitonin” (CT) means the human calcitonin protein, species variants thereof, including salmon calcitonin (“sCT”), and non-natural sequence variants having at least a portion of the biological activity of mature CT. CT is a 32 amino acid peptide cleaved from a larger prohormone of the thyroid that appears to function in the nervous and vascular systems, but has also been reported to be a potent hormonal mediator of the satiety reflex. CT is named for its secretion in response to induced hypercalcemia and its rapid hypocalcemic effect. It is produced in and secreted from neuroendocrine cells in the thyroid termed C cells. CT has effects on the osteoclast, and the inhibition of osteoclast functions by CT results in a decrease in bone resorption. In vitro effects of CT include the rapid loss of ruffled borders and decreased release of lysosomal enzymes. A major function of CT(1-32) is to combat acute hypercalcemia in emergency situations and/or protect the skeleton during periods of “calcium stress” such as growth, pregnancy, and lactation. (Reviewed in Becker, JCEM, 89(4): 1512-1525 (2004) and Sexton, Current Medicinal Chemistry 6: 1067-1093 (1999)). Calcitonin-containing fusion proteins of the invention may find particular use for the treatment of osteoporosis and as a therapy for Paget's disease of bone. Synthetic calcitonin peptides have been created, as described in U.S. Pat. Nos. 5,175,146 and 5,364,840.

[0124] “Calcitonin gene related peptide” or “CGRP” means the human CGRP peptide and species and non-natural sequence variants having at least a portion of the biological activity of mature CGRP. Calcitonin gene related peptide is a member of the calcitonin family of peptides, which in humans exists in two forms, α-CGRP (a 37 amino acid peptide) and β-CGRP. CGRP has 43-46% sequence identity with human amylin. CGRP-containing fusion proteins of the invention may find particular use in decreasing morbidity associated with diabetes, ameliorating hyperglycemia and insulin deficiency, inhibition of lymphocyte infiltration into the islets, and protection of beta cells against autoimmune destruction. Methods for making synthetic and recombinant CGRP are described in U.S. Pat. No. 5,374,618.

[0125] “Cholecystokinin” or “CCK” means the human CCK peptide and species and non-natural sequence variants having at least a portion of the biological activity of mature CCK. CCK-58 is the mature sequence, while the CCK-33 amino acid sequence first identified in humans is the major circulating form of the peptide. The CCK family also includes an 8-amino acid in vivo C-terminal fragment (“CCK-8”), pentagastrin or CCK-5 being the C-terminal peptide CCK(29-33), and CCK-4 being the C-terminal tetrapeptide CCK(30-33). CCK is a peptide hormone of the gastrointestinal system responsible for stimulating the digestion of fat and protein. CCK-33 and CCK-8-containing fusion proteins of the invention may find particular use in reducing the increase in circulating glucose after meal ingestion and potentiating the increase in circulating insulin. Analogues of CCK-8 have been prepared, as described in U.S. Pat. No. 5,631,230.

[0126] “Exendin-3” means a glucose regulating peptide isolated from Heloderma horridum and non-natural sequence variants having at least a portion of the biological activity of mature exendin-3. Exendin-3 amide is a specific exendin receptor antagonist from that mediates an increase in pancreatic cAMP, and release of insulin and amylase. Exendin-3-containing fusion proteins of the invention may find particular use in the treatment of diabetes and insulin resistance disorders. The sequence and methods for its assay are described in U.S. Pat. No. 5,424,286.

[0127] Exendin-4″ means a glucose regulating peptide found in the saliva of the Gila-monster Heloderma suspectum, as well as species and sequence variants thereof, and includes the native 39 amino acid sequence His-Gly-Gly-Gly-Pro-Ser-Ser-Gly-Ala-Pro-Pro-Pro-Ser (SEQ ID NO: 57) and homologous sequences and peptide mimetics, including GLP-1 and variants thereof; natural sequences, such as from primates and non-natural sequence variants having at least a portion of the biological activity of mature exendin 4. Exendin-4 is an incretin polypeptide hormone that decreases blood glucose, promotes insulin secretion, slows gastric emptying and improves satiety, providing a marked improvement in postprandial hyperglycemia. The exendins have some sequence similarity to members of the glucagon-like peptide family, with the highest identity being to GLP-1 (Goke, et al., J. Biol. Chem., 268:19650-55 (1993)). Exendin-4 binds at GLP-1 receptors on insulin-secreting βTC1 cells, and also stimulates somatostatin release and inhibits gastrin release in isolated stomachs (Goke, et al., J. Biol. Chem. 268:19650-55, 1993). As a mimetic of GLP-1, exendin-4 displays a similar broad range of biological activities, yet has a longer half-life than GLP-1, with a mean terminal half-life of 2.4 h. Exenatide is a synthetic version of exendin-4, marketed as Byetta. However, due to its short half-life, exenatide is currently dosed twice daily, limiting its utility. Exendin-4-containing fusion proteins of the invention may find particular use in the treatment of diabetes and insulin resistance disorders.

[0128] ‘Fibroblast growth factor 21’, or “FGF21” means the human protein encoded by the FGF21 gene, or species and non-natural sequence variants having at least a portion of the biological activity of mature FGF21. FGF21 stimulates glucose uptake in adipocytes but not in other cell types; the effect is additive to the activity of insulin. FGF21 injection in ob/ob mice results in an increase in Glut1 in adipose tissue. FGF21 also protects animals from diet-induced obesity when over expressed in transgenic mice and lowers blood glucose and triglyceride levels when administered to diabetic rodents (Kharitonenkov A, et al., (2005). “FGF-21 as a novel metabolic regulator”. J. Clin. Invest. 115: 1627-35). FGF21-containing fusion proteins of the invention may find particular use in treatment of diabetes, including causing increased energy expenditure, fat utilization and lipid excretion. FGF21 has been cloned, as disclosed in U.S. Pat. No. 6,716,626.

[0129] “FGF-19”, or “fibroblast growth factor 19” means the human protein encoded by the FGF19 gene, or species and non-natural sequence variants having at least a portion of the biological activity of mature FGF-19. FGF-19 is a protein member of the fibroblast growth factor (FGF) family. FGF family members possess broad mitogenic and cell survival activities, and are involved in a variety of biological processes. FGF-19 increases liver expression of the leptin receptor, metabolic rate, stimulates glucose uptake in adipocytes, and leads to loss of weight in an obese mouse model (Fu, L, et al. FGF-19-containing fusion proteins of the invention may find particular use in increasing metabolic rate and reversal of dietary and leptin-deficient diabetes. FGF-19 has been cloned and expressed, as described in US Patent Application No. 20020042367.

[0130] “Gastrin” means the human gastrin peptide, truncated versions, and species and non-natural sequence variants having at least a portion of the biological activity of mature gastrin. Gastrin is a linear peptide hormone produced by G cells of the duodenum and in the pyloric antrum of the stomach and is secreted into the bloodstream. Gastrin is found primarily in three forms: gastrin-34 (“big gastrin”); gastrin-17 (“little gastrin”); and gastrin-14 (“minigastrin”). It shares sequence homology with CCK. Gastrin-containing fusion proteins of the invention may find particular use in the treatment of obesity and diabetes for glucose regulation. Gastrin has been synthesized, as described in U.S. Pat. No. 5,843,446.

[0131] “Ghrelin” means the human hormone that induces satiation, or species and non-natural sequence variants having at least a portion of the biological activity of mature ghrelin, including the native, processed 27 or 28 amino acid sequence and homologous sequences. Ghrelin is produced mainly by P/D1 cells lining the fundus of the human stomach and epsilon cells of the pancreas that stimulates hunger, and is considered the counterpart hormone to leptin. Ghrelin levels increase before meals and decrease after meals, and can result in increased food intake and increase fat mass by an action exerted at the level of the hypothalamus. Ghrelin also stimulates the release of growth hormone. Ghrelin is acylated at a serine residue by n-octanoic acid; this acylation is essential for binding to the GHS1a receptor and for the agonist activity and the GH-releasing capacity of ghrelin. Ghrelin-containing fusion proteins of the invention may find particular use as agonists; e.g., to selectively stimulate motility of the GI tract in gastrointestinal motility disorder, to accelerate gastric emptying, or to stimulate the release of growth hormone. The invention also contemplates unacylated forms and sequence variants of ghrelin, which act as antagonists. Ghrelin analogs with sequence substitutions or truncated variants, such as described in U.S. Pat. No. 7,385,026, may find particular use as fusion partners to XTEN for use as antagonists for improved glucose homeostasis, treatment of insulin resistance and treatment of obesity. The isolation and characterization of ghrelin has been reported (Kojima M, et al., Ghrelin is a growth-hormone-releasing acylated peptide from stomach. Nature. 1999; 402(6762):656-660) and synthetic analogs have been prepared by peptide synthesis, as described in U.S. Pat. No. 6,967,237.

[0132] “Glucagon” means the human glucagon glucose regulating peptide, or species and sequence variants thereof, including the native 29 amino acid sequence and homologous sequences; natural, such as from primates, and non-natural sequence variants having at least a portion of the biological activity of mature glucagon. The term “glucagon” as used herein also includes peptide mimetics of glucagon. Native glucagon is produced by the pancreas, released when blood glucose levels start to fall too low, causing the liver to convert stored glycogen into glucose and release it into the bloodstream. While the action of glucagon is opposite that of insulin, which signals the body's cells to take in glucose from the blood, glucagon also stimulates the release of insulin, so that newly-available glucose in the bloodstream can be taken up and used by insulin-dependent tissues. Glucagon-containing fusion proteins of the invention may find particular use in increasing blood glucose levels in individuals with extant hepatic glycogen stores and maintaining glucose homeostasis in diabetes. Glucagon has been cloned, as disclosed in U.S. Pat. No. 4,826,763.

[0133] “GLP-1” means human glucagon like peptide-1 and non-natural sequence variants having at least a portion of the biological activity of mature GLP-1. The term “GLP-1” includes human GLP-1(1-37), GLP-1(7-37), GLP-1(7-36)amide, and the GLP-1 analogs of Table 39. GLP-1 stimulates insulin secretion, but only during periods of hyperglycemia. The safety of GLP-1 compared to insulin is enhanced by this property and by the observation that the amount of insulin secreted is proportional to the magnitude of the hyperglycemia. The biological half-life of GLP-1(7-37)OH is a mere 3 to 5 minutes (U.S. Pat. No. 5,118,666). GLP-1-containing fusion proteins of the invention may find particular use in the treatment of diabetes and insulin-resistance disorders for glucose regulation, as well as cardiovascular disorders such as prevention of cardiac remodeling. GLP-1 has been cloned and derivatives prepared, as described in U.S. Pat. No. 5,118,666.

[0134] “GLP-2” means human glucagon like peptide-2 and non-natural sequence variants having at least a portion of the biological activity of mature GLP-2. More particularly, GLP-2 is a 33 amino acid peptide, co-secreted along with GLP-1 from intestinal endocrine cells in the small and large intestine.

[0135] “IGF-1” or “Insulin-like growth factor 1” means the human IGF-1 protein and species and non-natural sequence variants having, at least a portion of the biological activity of mature IGF-1. IGF-1, which was once called somatomedin C, is a polypeptide protein anabolic hormone similar in molecular structure to insulin, and that modulates the action of growth hormone. IGF-1 consists of 70 amino acids and is produced primarily by the liver as an endocrine hormone as well as in target tissues in a paracrine/autocrine fashion. IGF-1-containing fusion proteins of the invention may find particular use in the treatment of diabetes and insulin-resistance disorders for glucose regulation. IGF-1 has been cloned and expressed in E. coli and yeast, as described in U.S. Pat. No. 5,324,639.

[0136] “IGF-2” or “Insulin-like growth factor 2” means the human IGF-2 protein and species and non-natural sequence variants having at least a portion of the biological activity of mature IGF-2. IGF-2 is a polypeptide protein hormone similar in molecular structure to insulin, with a primary role as a growth-promoting hormone during gestation. IGF-2 has been cloned, as described in Bell G I, et al. Isolation of the human insulin-like growth factor genes: insulin-like growth factor II and insulin genes are contiguous. Proc Natl Acad Sci USA. 1985. 82(19):6450-4.

[0137] “IL-1ra” means the human IL-1 receptor antagonist protein and species and sequence variants thereof, including the sequence variant anakinra (Kineret®), having at least a portion of the biological activity of mature IL-1ra. IL-1ra is a protein that acts as a natural inhibitor or antagonist of interleukin-1 by binding to the IL-1 receptor (IL-1R). IL-1ra-containing fusion proteins of the invention may find particular use in the treatment of type 2 diabetes for glucose regulation or chronic inflammatory disorders. IL-1ra has been cloned, as described in U.S. Pat. Nos. 5,075,222 and 6,858,409.

[0138] “INGAP”, or “islet neogenesis-associated protein”, or “pancreatic beta cell growth factor” means the human INGAP peptide and species and non-natural sequence variants having at least a portion of the biological activity of mature INGAP. INGAP is capable of initiating duct cell proliferation, a prerequisite for islet neogenesis. INGAP-containing fusion proteins of the invention may find particular use in the treatment or prevention of diabetes and insulin-resistance disorders. INGAP has been cloned and expressed, as described in R Rafaeloff R, et al., Cloning and sequencing of the pancreatic islet neogenesis associated protein (INGAP) gene and its expression in islet neogenesis in hamsters. J Clin Invest. 1997. 99(9): 2100-2109.

[0139] “Intermedin” or “AFP-6” means the human intermedin peptide and species and sequence variants thereof having at least a portion of the biological activity of mature intermedin. Intermedin is a ligand for the calcitonin receptor-like receptor. Intermedin treatment leads, to blood pressure reduction both in normal and hypertensive subjects, as well as the suppression of gastric emptying activity, and is implicated in glucose homeostasis. Intermedin-containing fusion proteins of the invention may find particular use in the treatment of diabetes, insulin-resistance disorders, and obesity. Intermedin peptides and variants have been cloned, as described in U.S. Pat. No. 6,965,013.

[0140] “Leptin” means the naturally occurring leptin from any species, as well as biologically active D-isoforms, or fragments and non-natural sequence variants having at least a portion of the biological activity of mature leptin. Leptin plays a key role in regulating energy intake and energy expenditure, including appetite and metabolism. Leptin-containing fusion proteins of the invention may find particular use in the treatment of diabetes for glucose regulation, insulin-resistance disorders, and obesity. Leptin is the polypeptide product of the ob gene as described in the International Patent Pub. No. WO 96/05309. Leptin has been cloned, as described in U.S. Pat. No. 7,112,659, and leptin analogs and fragments in U.S. Pat. No. 5,521,283, U.S. Pat. No. 5,532,336, PCT/US96/22308 and PCT/US96/01471.

[0141] “Natriuretic peptides” means atrial natriuretic peptide (ANP), brain natriuretic peptide (BNP or B-type natriuretic peptide) and C-type natriuretic peptide (CNP); both human and non-human species and sequence variants thereof baying at least a portion of the biological activity of the mature counterpart natriuretic peptides. Alpha atrial natriuretic peptide (aANP) or (ANP) and brain natriuretic peptide (BNP) and type C natriuretic peptide (CNP) are homologous polypeptide hormones involved in the regulation of fluid and electrolyte homeostasis. Sequences of useful forms of natriuretic peptides are disclosed in U.S. Patent Publication 20010027181. Examples of ANPs include human ANP (Kangawa et al., BBRC 118:131 (1984)) or that from various species, including pig and rat ANP (Kangawa et al., BBRC 121:585 (1984)). Sequence analysis reveals that preproBNP consists of 134 residues and is cleaved to a 108-amino acid ProBNP. Cleavage of a 32-amino acid sequence from the C-terminal end of ProBNP results in human BNP (77-108), which is the circulating, physiologically active form. The 32-amino acid human BNP involves the formation of a disulfide bond (Sudoh et al., BBRC 159:1420 (1989)) and U.S. Pat. Nos. 5,114,923, 5,674,710, 5,674,710, and 5,948,761. BFXTEN-containing one or more natriuretic functions may be useful in treating hypertension, diuresis inducement, natriuresis inducement, vascular conduct dilatation or relaxation, natriuretic peptide receptors (such as NPR-A) binding, renin secretion suppression from the kidney, aldostrerone secretion suppression from the adrenal gland, treatment of cardiovascular diseases and disorders, reducing, stopping or reversing cardiac remodeling after a cardiac event or as a result of congestive heart failure, treatment of renal diseases and disorders; treatment or prevention of ischemic stroke, and treatment of asthma.

[0142] “Neuromedin” means the neuromedin family of peptides including neuromedin U and S peptides, and non-natural sequence variants having at least a portion of the biological activity of mature neuromedin. The native active human neuromedin U peptide hormone is neuromedin-U25, particularly its amide form. Of particular interest are their processed active peptide hormones and analogs, derivatives and fragments thereof. Included in the neuromedin U family are various truncated or splice variants, e.g., FLFHYSKTQKLGKSNVVEELQSPFASQSRGYFLFRPRN (SEQ ID NO: 58). Exemplary of the neuromedin S family is human neuromedin S with the sequence ILQRGSGTAAVDFTKKDHTATWGRPFFLFRPRN (SEQ ID NO: 59), particularly its amide form. Neuromedin fusion proteins of the invention may find particular use in treating obesity, diabetes, reducing food intake, and other related conditions and disorders as described herein. Of particular interest are neuromedin modules combined with an amylin family peptide, an exendin peptide family or a GLP I peptide family module.

[0143] “Oxyntomodulin”, or “OXM” means human oxyntomodulin and species and sequence variants thereof having at least a portion of the biological activity of mature OXM. OXM is a 37 amino acid peptide produced in the colon that contains the 29 amino acid sequence of glucagon followed by an 8 amino acid carboxyterminal extension. OXM has been found to suppress appetite. OXM-containing fusion proteins of the invention may find particular use in the treatment of diabetes for glucose regulation, insulin-resistance disorders, obesity, and can be used as a weight loss treatment.

[0144] “PYY” means human peptide YY polypeptide and species and non-natural sequence variants having at least a portion of the biological activity of that we PYY. “PYY” includes both the human full length, 36 amino acid peptide, PYY₁₋₃₆ and PYY₃₋₃₆ which have the PP fold structural motif. PYY inhibits gastric motility and increases water and electrolyte absorption in the colon. PYY may also suppress pancreatic secretion. PPY-containing fusion proteins of the invention may find particular use in the treatment of diabetes for glucose regulation, insulin-resistance disorders, and obesity. Analogs of PYY have been prepared, as described in U.S. Pat. Nos. 5,604,203, 5,574,010 and 7,166,575.

[0145] “Urocortin” means a human urocortin peptide hormone and non-natural sequence variants having at least a portion of the biological activity of mature urocortin. There are three human urocortins: Ucn-1, Ucn-2 and Ucn-3. Further urocortins and analogs have been described in U.S. Pat. No. 6,214,797. Urocortins Ucn-2 and Ucn-3 have food-intake suppression, antihypertensive, cardioprotective, and inotropic properties. Ucn-2 and Ucn-3 have the ability to suppress the chronic HPA activation following a stressful stimulus such as dieting/fasting, and are specific for the CRF type 2 receptor and do not activate CRF-R1 which mediates ACTH release. BFXTEN comprising urocortin, e.g., Ucn-2 or Ucn-3, may be useful for vasodilation and thus for cardiovascular uses such as chronic heart failure. Urocortin-containing fusion proteins of the invention may also find particular use in treating or preventing conditions associated with stimulating ACTH release, hypertension due to vasodilatory effects, inflammation mediated via other than ACTH elevation, hyperthermia, appetite disorder, congestive heart failure, stress, anxiety, and psoriasis. Urocortin-containing fusion proteins may also be combined with a natriuretic peptide module, amylin family, and exendin family, or a GLP1 family module to provide an enhanced cardiovascular benefit, e.g. treating CHF, as by providing a beneficial vasodilation effect.

[0146] “Urodilatin” means the C-terminal 32 amino acids of the protein gamma-hANaP and non-natural sequence variants having at least a portion of the biological activity of mature urodilatin. Urodilatin originates from precursor proteins formed in the kidneys by post-translator processing, Urodilantin-containing fusion proteins of the invention may find particular use for vasodilation and treating hypertension. The isolation and synthesis of urodilantin has been described in U.S. Pat. No. 5,665,861.

[0147] The BP of the subject compositions, particularly those disclosed in Table 1 together with their corresponding nucleic acid and amino acid sequences, are well known in the art and descriptions and sequences are available in public databases such as Chemical Abstracts Services Databases (e.g., the CAS Registry), GenBank, The Universal Protein Resource (UniProt) and subscription provided databases such as GenSeq (e.g., Derwent). Polynucleotide sequences may be a wild type polynucleotide sequence encoding a given BP (e.g., either full length or mature), or in some instances the sequence may be a variant of the wild type polynucleotide sequence (e.g., a polynucleotide which encodes the wild type biologically active protein, wherein the DNA sequence of the polynucleotide has been optimized, for example, for expression in a particular species; or a polynucleotide encoding a variant of the wild type protein, such as a site directed mutant or an allelic variant. It is well within the ability of the skilled artisan to use a wild-type or consensus cDNA sequence or a codon-optimized variant of a BP to create BFXTEN constructs contemplated by the invention using methods known in the art and/or in conjunction with the guidance and methods provided herein, and described more fully in the Examples.

[0148] The BP of the subject compositions are not limited to native, full-length polypeptides, but also include recombinant versions as well as biologically and/or pharmacologically active variants or fragments and non-natural sequence variants having at least a portion of the biological activity of the mature BP. For example, it will be appreciated that various amino acid substitutions can be made in the BP to create variants without departing from the spirit of the invention with respect to the biological activity or pharmacologic properties of the BP. Examples of conservative substitutions for amino acids in polypeptide sequences are shown in Table 2. However, the invention contemplates substitution of any of the other 19 natural L-amino acids for a given amino acid residue of the native BP, which may be at any position within the sequence of the BP, including adjacent amino acid residues. If any one substitution results in an undesirable change in biological activity, then one of the alternative amino acids can be employed and the construct evaluated by the methods described herein, or using any of the techniques and guidelines for conservative and non-conservative mutations set forth, for instance, in U.S. Pat. No. 5,364,934, the contents of which is incorporated by reference in its entirety, or using methods generally known to those of skill in the art. In addition, variants can also include, for instance, polypeptides wherein one or more amino acid residues are added or deleted at the N- or C-terminus of the full-length native amino acid sequence of a BP that retains at least a portion of the biological activity of the native peptide. Sequence variants of BP, whether exhibiting substantially the same or better bioactivity than wild-type BP, or, alternatively, exhibiting substantially modified or reduced bioactivity relative to wild-type BP, include, without limitation, polypeptides having an amino acid sequence that differs from the sequence of wild-type BP by insertion, deletion, or substitution of one or more amino acids.

TABLE 2
Exemplary conservative amino acid substitutions

| Original Residue | Exemplary Substitutions |
|---|---|
| Ala (A) | val; leu; ile |
| Arg (R) | lys; gin; asn |
| Asn (N) | gin; his; Iys; arg |
| Asp (D) | Glu |
| Cys (C) | ser |
| Gln (Q) | asn |
| Glu (E) | asp |
| Gly (G) | pro |
| His (H) | asn: gin: Iys: arg |
| Ile (I) | leu; val; met; ala; phe: norleucine |
| Leu (L) | norleucine: ile: val; met; ala: phe |
| Lys (K) | arg: gin: asn |
| Met (M) | leu; phe; ile |
| Phe (F) | leu: val: ile; ala |
| Pro (P) | gly |
| Ser (S) | thr |
| Thr (T) | ser |
| Trp (W) | tyr |
| Tyr (Y) | trp: phe: thr: ser |
| Val (V) | ile; leu; met; phe; ala; norleucine |

[0149] (b) Extended Recombinant Polypeptides (XTEN)

[0150] In one aspect, the invention provides XTEN polypeptide compositions that are useful as fusion protein partner(s) to which BP are linked, resulting in BFXTEN fusion proteins. XTEN are generally extended length polypeptides with non-naturally occurring, substantially non-repetitive sequences that are composed mainly of small hydrophilic amino acids, with the sequence having a low degree or no secondary or tertiary structure under physiologic conditions.

[0151] XTENs have utility as a fusion protein partners in that they serve in various roles, conferring certain desirable pharmacokinetic, physicochemical and pharmaceutical properties when linked to a BP protein to a create a fusion protein. Such desirable properties include but are not limited to enhanced pharmacokinetic parameters and solubility characteristics of the compositions, or can serve as linkers between or within domains of the functional protein, amongst other properties described herein. Such fusion protein compositions have utility to treat certain metabolic or cardiovascular diseases, disorders or conditions, as described herein. As used herein, “XTEN” specifically excludes whole antibodies or antibody fragments (e.g. single-chain antibodies and Fc fragments), albumin, and polypeptides with highly repetitive sequences.

[0152] In some embodiments the XTEN serves as a carrier that is a long polypeptide having greater than about 100 to about 3000 amino acid residues as a single polypeptide or cumulatively when more than one XTEN unit is used in a single fusion protein. In other embodiments, when XTEN is used as a linker between BP fusion protein components or insertion sites internal to BP, an XTEN sequence or a fragment of an XTEN sequence shorter than a carrier can be used, such as about 288 amino acid residues, or about 144, or about 100, or about 96, or about 84, or about 72, or about 60, or about 48, or about 42, or about 36, or about 12, or about 6 amino acid residues incorporated at one or more locations into the BFXTEN fusion protein composition.

[0153] The selection criteria for the XTEN to be linked to the biologically active proteins used to create the inventive fusion proteins compositions generally relate to attributes of physicochemical properties and conformational structure of the XTEN that is, in turn, used to confer enhanced pharmaceutical and pharmacokinetic properties to the fusion proteins compositions. The XTEN of the present invention exhibits one or more of the following advantageous properties: conformational flexibility, enhanced aqueous solubility, high degree of protease resistance, low immunogenicity, low binding to mammalian receptors, and increased hydrodynamic (or Stokes) radii; properties that make them particularly useful as fusion protein partners. Non-limiting examples of the properties of the fusion proteins comprising BP that are enhanced by XTEN include increases in the overall solubility and/or metabolic stability, reduced susceptibility to proteolysis, reduced immunogenicity, reduced rate of absorption when administered subcutaneously or intramuscularly, and enhanced pharmacokinetic properties such as longer terminal half-life and increased area under the curve (AUC), lower volume of distribution, slower absorption after subcutaneous or intramuscular injection (compared to BP not linked to XTEN and administered by a similar route) such that the Cmax is lower, which, in turn, results in reductions in adverse effects of the BP that, collectively, results in an increased period of time that a fusion protein of a BFXTEN composition administered to a subject retains therapeutic activity. As a result of these enhanced properties, it is contemplated that BFXTEN compositions for subcutaneous or intramuscular administration will provide enhanced bioavailability and permit less frequent dosing compared to BP not linked to XTEN and administered in a comparable fashion.

[0154] A variety of methods and assays are known in the art for determining the physical/chemical properties of proteins such as XTEN or BFXTEN fusion protein compositions comprising the inventive XTEN; properties such as secondary or tertiary structure, solubility, protein aggregation, melting properties, contamination and water content. Such methods include analytical centrifugation, EPR, HPLC-ion exchange, HPLC-size exclusion, HPLC-reverse phase, light scattering, capillary electrophoresis, circular dichroism, differential scanning calorimetry, fluorescence, HPLC-ion exchange, HPLC-size exclusion, IR, NMR, Raman spectroscopy, refractometry, and UV/Visible spectroscopy. Additional methods are disclosed in Arnau et al, Prot Expr and Purif (2006) 48, 1-13.

[0155] In one embodiment, XTEN is designed to behave like denatured peptide sequence under physiological conditions, despite the extended length of the polymer. “Denatured” describes the state of a peptide in solution that is characterized by a large conformational freedom of the peptide backbone. Most peptides and proteins adopt a denatured conformation in the presence of high concentrations of denaturants or at elevated temperature. Peptides in denatured conformation have, for example, characteristic circular dichroism (CD) spectra and are characterized by a lack of long-range interactions as determined by NMR. “Denatured conformation” and “unstructured conformation” are used synonymously herein. In some embodiments, the invention provides XTEN sequences that, under physiologic conditions, resemble denatured sequences that are largely devoid in secondary structure. The XTEN sequences of the BFXTEN compositions of the invention are substantially devoid of secondary structure under physiologic conditions. “Largely devoid,” as used in this context, means that less than 50% of the XTEN amino acid residues of the XTEN sequence contribute to secondary structure as measured or determined by the means described herein. “Substantially devoid,” as used in this context, means that at least about 60%, or about 70%, or about 80%, or about 90%, or about 95%, or at least about 99% of the XTEN amino acid residues of the XTEN sequence do not contribute to secondary structure, as measured or determined by the methods described herein.

[0156] A variety of methods have been established in the art to discern the presence or absence of secondary and tertiary structures in a given polypeptide. In particular, secondary structure can be measured spectrophotometrically, e.g., by circular dichroism spectroscopy in the “far-UV” spectral region (190-250 nm). Secondary structure elements, such as alpha-helix and beta-sheet, each give rise to a characteristic shape and magnitude of CD spectra. Secondary structure can also be predicted for a polypeptide sequence via certain computer programs or algorithms, such as the well-known Chou-Fasman algorithm (Chou, P. Y., et al. (1974) Biochemistry, 13: 222-45) and the Garnier-Osguthorpe-Robson (“GOR”) algorithm (Garnier J, Gibrat J F, Robson B. (1996), GOR method for predicting protein secondary structure from amino acid sequence. Methods Enzymol 266:540-553), as described in US Patent Application Publication No. 20030228309A1. For a given sequence, the algorithms can predict whether there exists some or no secondary structure at all, expressed as the total and/or percentage of residues of the sequence that form, for example, alpha-helices or beta-sheets or the percentage of residues of the sequence predicted to result in random coil formation (which lacks secondary structure).

[0157] The XTEN sequences used in the subject fusion protein compositions have an alpha-helix percentage ranging from 0% to less than about 5% as determined by the Chou-Fasman algorithm. In some embodiments, the XTEN sequences of the fusion protein compositions have an alpha-helix percentage less than about 2% and a beta-sheet percentage less than about 2%. The XTEN sequences of the BFXTEN fusion protein compositions have a high degree of random coil percentage, as determined by the GOR algorithm. In some embodiments, an XTEN sequence have at least about 80%, more preferably at least about 90%, more preferably at least about 91%, more preferably at least about 92%, more preferably at least about 93%, more preferably at least about 94%, more preferably at least about 95%, more preferably at least about 96%, more preferably at least about 97%, more preferably at least about 98%, and most preferably at least about 99% random coil, as determined by the GOR algorithm.

[0158] 1. Non-Repetitive Sequences

[0159] It is specifically contemplated that the XTEN sequences of the BFXTEN compositions are substantially non-repetitive. In general, repetitive amino acid sequences have a tendency to aggregate or form higher order structures, as exemplified by natural repetitive sequences such as collagens and leucine zippers. These repetitive amino acids may also tend to form contacts resulting in crystalline or pseudocrystalline structures. In contrast, the low tendency of non-repetitive sequences to aggregate enables the design of long-sequence XTENs with a relatively low frequency of charged amino acids that would otherwise be likely to aggregate if the sequences were repetitive. In one embodiment, the XTEN sequences have greater than about 36 to about 1000 amino acid residues, or about 100 to about 3000 amino acid residues in which no three contiguous amino acids in the sequence are identical amino acid types unless the amino acid is serine, in which case no more than three contiguous amino acids are serine residues. In the foregoing embodiment, the XTEN sequence is “substantially non-repetitive.” In another embodiment, as described more fully below, the XTEN sequences of the compositions comprise non-overlapping sequence motifs of 9 to 14 amino acid residues wherein the motifs consist of 4 to 6 types of amino acids selected from glycine (G), alanine (A), serine (S), threonine (T), glutamate (E) and proline (P), and wherein the sequence of any two contiguous amino acid residues in any one motif is not repeated more than twice in the sequence motif. In the foregoing embodiment, the XTEN sequence is “substantially non-repetitive.”

[0160] The degree of repetitiveness of a polypeptide or a gene can be measured by computer programs or algorithms or by other means known in the art. In one non-limiting example, repetitiveness in a polypeptide sequence can be assessed by determining the number of times shorter specific sequences of a given length occur within the polypeptide. For example, a polypeptide of 200 amino acid residues length has a total of 165 overlapping 36-amino acid “blocks” (or “36-mers”) and 198 3-mer “subsequences”, but the number of unique 3-mer subsequences (meaning a unique specific amino acid sequence of the 3-mer) found within the 200 amino acid sequence will depend on the amount of repetitiveness within the sequence; a polypeptide with a higher degree of repetitiveness within the blocks of the polypeptide will have fewer unique 3-mer subsequences and more repeat occurrences of 3-mer subsequences compared to a polypeptide with a lower degree of repetitiveness. A score can be generated (hereinafter “subsequence score”) that is reflective of the degree of repetitiveness for a polypeptide of any length. In one embodiment, the subsequence score is determined for a polypeptide of a given length by determining the average of the cumulative number of occurrences (the “count”) of each unique subsequence (the sequence of a fixed, short peptide length) per each overlapping block (defined as a fixed, intermediate peptide length) of the polypeptide of interest. The subsequence score can be determined by applying the following equation to the polypeptide of interest:

$$Subsequence score = \frac{{\sum }_{i = 1}^{n} ( \frac{{Count}_{i}}{m} )}{n}$$

[0161] where: n=(amino acid length of polypeptide)−(amino acid length of block)+1;
   [0162] m=(amino acid length of block)−(amino acid length of subsequence)+1; and
   [0163] Countᵢ=cumulative number of occurrences of each unique subsequence within blockᵢ
      While the invention contemplates that the equation variable “subsequence” can be a peptide length of 3 to about 10 amino acid residues and that the variable “block” can be a peptide length of about 20 to about 200 amino acid residues, as used herein, “subsequence score” for a polypeptide is determined by application of the foregoing equation to a polypeptide sequence wherein the block length is set at 36 amino acids and the subsequence length is set at 3 amino acids. Examples of subsequence scores derived using the equation with a block length of 36 and frame length of 3 applied to polypeptides of varying composition and sequence, including XTEN sequences of varying length, are presented in Example 28. In one embodiment, the present invention provides BFXTEN comprising one XTEN in which the XTEN has a subsequence score of 3 or less, and more preferably less than 2. In another embodiment, the invention provides BFXTEN comprising two or more XTEN in which at least one XTEN has a subsequence score of 3 or less, and more preferably less than 2. In yet another embodiment, the invention provides BFXTEN comprising multiple XTEN in which each individual XTEN has a subsequence score of 3 or less, and more preferably less than 2. In the embodiments of the BFXTEN fusion protein compositions described herein, an XTEN component of a fusion protein with a subsequence score of 3 or less is “substantially non-repetitive.”

[0164] It is believed that the non-repetitive characteristic of XTEN of the present invention contributes to many of the enhanced physicochemical and biological properties of the BFXTEN fusion proteins; either solely or in conjunction with the choice of the particular types of amino acids that predominate in the XTEN of the compositions disclosed herein. These properties include a higher degree of expression of the fusion protein in the host cell, greater genetic stability of the gene encoding XTEN, and a greater degree of solubility and less tendency to aggregate of the resulting BFXTEN compared to fusion proteins comprising polypeptides having repetitive sequences. These properties permit more efficient manufacturing, lower cost of goods, and facilitate the formulation of XTEN-comprising pharmaceutical preparations containing extremely high drug concentrations, in some cases exceeding 100 mg/ml. Furthermore, the XTEN polypeptide sequences of the embodiments are designed to have a low degree of internal repetitiveness in order to reduce or substantially eliminate immunogenicity when administered to a mammal. Polypeptide sequences composed of short, repeated motifs largely limited to only three amino acids, such as glycine, serine and glutamate, may result in relatively high antibody titers when administered to a mammal despite the absence of predicted T-cell epitopes in these sequences. This may be caused by the repetitive nature of polypeptides, as it has been shown that immunogens with repeated epitopes, including protein aggregates, cross-linked immunogens, and repetitive carbohydrates are highly immunogenic and can, for example, result in the cross-linking of B-cell receptors causing B-cell activation. (Johansson, J., et al. (2007) Vaccine, 25:1676-82; Yankai, Z., et al. (2006) Biochem Biophys Res Commun, 345:1365-71; Hsu, C. T., et al. (2000) Cancer Res, 60:3701-5); Bachmann M F, et al. Eur J. Immunol. (1995) 25(12):3445-3451).

[0165] 2. Exemplary Sequence Motifs

[0166] The present invention encompasses XTEN used as fusion partners that comprise multiple units of shorter sequences, or motifs, in which the amino acid sequences of the motifs are non-repetitive. The non-repetitive criterion can be met despite the use of a “building block” approach using a library of sequence motifs that are multimerized to create the XTEN sequences. Thus, while an XTEN sequence may consist of multiple units of as few as four different types of sequence motifs, because the motifs themselves generally consist of non-repetitive amino acid sequences, the overall XTEN sequence is rendered substantially non-repetitive.

[0167] In one embodiment, XTEN have a non-repetitive sequence of greater than about 36 to about 3000 amino acid residues wherein at least about 80%, or at least about 85%, or at least about 90%, or at least about 95%, or at least about 97%, or about 100% of the XTEN sequence consists of non-overlapping sequence motifs, wherein each of the motifs has about 9 to 36 amino acid residues. In other embodiments, at least about 80%, or at least about 85%, or at least about 90%, or at least about 95%, or at least about 97%, or about 100% of the XTEN sequence consists of non-overlapping sequence motifs wherein each of the motifs has 9 to 14 amino acid residues. In still other embodiments, at least about 80%, or at least about 85%, or at least about 90%, or at least about 95%, or at least about 97%, or about 100% of the XTEN sequence component consists of non-overlapping sequence motifs wherein each of the motifs has 12 amino acid residues. In these embodiments, it is preferred that the sequence motifs be composed mainly of small hydrophilic amino acids, such that the overall sequence has an unstructured, flexible characteristic. Examples of amino acids that are included in XTEN are, e.g., arginine, lysine, threonine, alanine, asparagine, glutamine, aspartate, glutamate, serine, and glycine. As a result of testing variables such as codon optimization, assembly polynucleotides encoding sequence motifs, expression of protein, charge distribution and solubility of expressed protein, and secondary and tertiary structure, it was discovered that XTEN compositions with enhanced characteristics mainly include glycine (G), alanine (A), serine (S), threonine (T), glutamate (E) and proline (P) residues wherein the sequences are designed to be substantially non-repetitive. XTEN sequences have at least 80% of the sequence consisting of four to six types of amino acids selected from glycine (G), alanine (A), serine (S), threonine (T), glutamate (E) or proline (P) that are arranged in a substantially non-repetitive sequence that is greater than about 36 to about 3000 amino acid residues in length. In some embodiments, XTEN have sequences of greater than about 36 to about 3000 amino acid residues wherein at least about 80% of the sequence consists of non-overlapping sequence motifs wherein each of the motifs has 9 to 36 amino acid residues wherein each of the motifs consists of 4 to 6 types of amino acids selected from glycine (G), alanine (A), serine (S), threonine (T), glutamate (E) and proline (P), and wherein the content of any one amino acid type in the full-length XTEN does not exceed 30%. In other embodiments, at least about 90% of the XTEN sequence consists of non-overlapping sequence motifs wherein each of the motifs has 9 to 36 amino acid residues wherein the motifs consist of 4 to 6 types of amino acids selected from glycine (G), alanine (A), serine (S), threonine (T), glutamate (E) and proline (P), and wherein the content of any one amino acid type in the full-length XTEN does not exceed 30%. In other embodiments, at least about 90% of the XTEN sequence consists of non-overlapping sequence motifs wherein each of the motifs has 12 amino acid residues consisting of 4 to 6 types of amino acids selected from glycine (G), alanine (A), serine (S), threonine (T), glutamate (E) and proline (P), and wherein the content of any one amino acid type in the full-length XTEN does not exceed 30%. In yet other embodiments, at least about 80%, or about 90%, or about 91%, or about 92%, or about 93%, or about 94%, or about 95%, or about 96%, or about 97%, or about 98%, or about 99%, to about 100% of the XTEN sequence consists of non-overlapping sequence motifs wherein each of the motifs has 12 amino acid residues consisting of glycine (G), alanine (A), serine (S), threonine (T), glutamate (E) and proline (P), and wherein the content of any one amino acid type in the full-length XTEN does not exceed 30%.

[0168] In still other embodiments, XTENs comprise non-repetitive sequences of greater than about 36 to about 3000 amino acid residues wherein at least about 80%, or at least about 90%, or about 91%, or about 92%, or about 93%, or about 94%, or about 95%, or about 96%, or about 97%, or about 98%, or about 99% of the sequence consists of non-overlapping sequence motifs of 9 to 14 amino acid residues wherein the motifs consist of 4 to 6 types of amino acids selected from glycine (G), alanine (A), serine (S), threonine (T), glutamate (E) and proline (P), and wherein the sequence of any two contiguous amino acid residues in any one motif is not repeated more than twice in the sequence motif. In other embodiments, at least about 80%, or about 90%, or about 91%, or about 92%, or about 93%, or about 94%, or about 95%, or about 96%, or about 97%, or about 98%, or about 99% of an XTEN sequence consists of non-overlapping sequence motifs of 12 amino acid residues wherein the motifs consist of four to six types of amino acids selected from glycine (G), alanine (A), serine (S), threonine (T), glutamate (E) and proline (P), and wherein the sequence of any two contiguous amino acid residues in any one sequence motif is not repeated more than twice in the sequence motif. In other embodiments, at least about 80%, or about 90%, or about 91%, or about 92%, or about 93%, or about 94%, or about 95%, or about 96%, or about 97%, or about 98%, or about 99% of an XTEN sequence consists of non-overlapping sequence motifs of 12 amino acid residues wherein the motifs consist of glycine (G), alanine (A), serine (S), threonine (T), glutamate (E) and proline (P), and wherein the sequence of any two contiguous amino acid residues in any one sequence motif is not repeated more than twice in the sequence motif. In yet other embodiments, XTENs consist of 12 amino acid sequence motifs wherein the amino acids are selected from glycine (G), alanine (A), serine (S), threonine (T), glutamate (E) and proline (P), and wherein the sequence of any two contiguous amino acid residues in any one sequence motif is not repeated more than twice in the sequence motif, and wherein the content of any one amino acid type in the full-length XTEN does not exceed 30%. In the foregoing embodiments hereinabove described in this paragraph, the XTEN sequences is “substantially non-repetitive.”.

[0169] In some embodiments, the BFXTEN compositions comprise one or more non-repetitive XTEN sequences of greater than about 100 to about 3000 amino acid residues, or greater than 400 to about 3000 residues, wherein at least about 80%, or at least about 90%, or about 91%, or about 92%, or about 93%, or about 94%, or about 95%, or about 96%, or about 97%, or about 98%, or about 99% to about 100% of the sequence consists of multiple units of two or more non-overlapping sequence motifs selected from the amino acid sequences of Table 3 wherein the overall sequence is substantially non-repetitive. In some embodiments, the XTEN comprises non-overlapping sequence motifs in which about 80%, or at least about 85%, or at least about 90%, or about 91%, or about 92%, or about 93%, or about 94%, or about 95%, or about 96%, or about 97%, or about 98%, or about 99% or about 100% of the sequence consists of multiple units of two or more non-overlapping sequences selected from a single motif family selected from Table 3, resulting in a family sequence. As used herein, “family” means that the XTEN has motifs selected only from a single motif category from Table 3; i.e., AD, AE, AF, AG, AM, AQ, BC, or BD XTEN, and that any other amino acids in the XTEN not from a family motif are selected to achieve a needed property, such as to permit incorporation of a restriction site by the encoding nucleotides, incorporation of a cleavage sequence, or to achieve a better linkage to a BP component. Accordingly, in the embodiments of XTEN families, an XTEN sequence comprises multiple units of non-overlapping sequence motifs of the AD motif family, or an XTEN sequence comprises multiple units of non-overlapping sequence motifs of the AE motif family, or an XTEN sequence comprises multiple units of non-overlapping sequence motifs of the AF motif family, or an XTEN sequence comprises multiple units of non-overlapping sequence motifs of the AG motif family, or an XTEN sequence comprises multiple units of non-overlapping sequence motifs of the AM motif family, or an XTEN sequence comprises multiple units of non-overlapping sequence motifs of the AQ motif family, or an XTEN sequence comprises multiple units of non-overlapping sequence motifs of the BC family, or an XTEN sequence comprises multiple units of non-overlapping sequence motifs of the BD family. In other embodiments, the XTEN comprises multiple units of motif sequences from two or more of the motif families of Table 3, selected to achieve desired physicochemical characteristics, including such properties as net charge, lack of secondary structure, or lack of repetitiveness that may be conferred by the amino acid composition of the motifs, described more fully below. In the embodiments hereinabove described in this paragraph, the motifs of Table 3 incorporated into the XTEN can be selected and assembled using the methods described herein to achieve an XTEN of about 36 to about 3000 amino acid residues.

TABLE 3
XTEN Sequence Motifs of 12 Amino Acids and
Motif Families

| Motif | MOTIF | SEQ ID |
|---|---|---|
| Family* | SEQUENCE | NO: |
| AD | GESPGGSSGSES | 60 |
| AD | GSEGSSGPGESS | 61 |
| AD | GSSESGSSEGGP | 62 |
| AD | GSGGEPSESGSS | 63 |
| AE, AM | GSPAGSPTSTEE | 64 |
| AE, AM, AQ | GSEPATSGSETP | 65 |
| AE, AM, AQ | GTSESATPESGP | 66 |
| AE, AM, AQ | GTSTEPSEGSAP | 67 |
| AF, AM | GSTSESPSGTAP | 68 |
| AF, AM | GTSTPESGSASP | 69 |
| AF, AM | GTSPSGESSTAP | 70 |
| AF, AM | GSTSSTAESPGP | 71 |
| AG, AM | GTPGSGTASSSP | 72 |
| AG, AM | GSSTPSGATGSP | 73 |
| AG, AM | GSSPSASTGTGP | 74 |
| AG, AM | GASPGTSSTGSP | 75 |
| AQ | GEPAGSPTSTSE | 76 |
| AQ | GTGEPSSTPASE | 77 |
| AQ | GSGPSTESAPTE | 78 |
| AQ | GSETPSGPSETA | 79 |
| AQ | GPSETSTSEPGA | 80 |
| AQ | GSPSEPTEGTSA | 81 |
| BC | GSGASEPTSTEP | 82 |
| BC | GSEPATSGTEPS | 83 |
| BC | GTSEPSTSEPGA | 84 |
| BC | GTSTEPSEPGSA | 85 |
| BD | GSTAGSETSTEA | 86 |
| BD | GSETATSGSETA | 87 |
| BD | GTSESATSESGA | 88 |
| BD | GTSTEASEGSAS | 89 |

*Denotes individual motif sequences that, when used together in various permutations, results in a “family sequence”

[0170] In other embodiments, the BFXTEN composition comprises one or more non-repetitive XTEN sequences of about 36 to about 3000 amino acid residues, wherein at least about 80%, or at least about 90%, or about 91%, or about 92%, or about 93%, or about 94%, or about 95%, or about 96%, or about 97%, or about 98%, or about 99% to about 100% of the sequence consists of non-overlapping 36 amino acid sequence motifs selected from one or more of the polypeptide sequences of Tables 9-12, either as a family sequence, or where motifs are selected from two or more families of motifs.

[0171] In those embodiments wherein the XTEN component of the BFXTEN fusion protein has less than 100% of its amino acids consisting of four to six amino acid selected from glycine (G), alanine (A), serine (S), threonine (T), glutamate (E) and proline (P), or less than 100% of the sequence consisting of the sequence motifs of Table 3 or the sequences of Tables 9-12, or less than 100% sequence identity compared with an XTEN from Table 4, the other amino acid residues are selected from any other of the 14 natural L-amino acids, but are preferentially selected from hydrophilic amino acids such that the XTEN sequence contains at least about 90%, or at least about 91%, or at least about 92%, or at least about 93%, or at least about 94%, or at least about 95%, or at least about 96%, or at least about 97%, or at least about 98%, or at least about 99% hydrophilic amino acids. The XTEN amino acids that are not glycine (G), alanine (A), serine (S), threonine (T), glutamate (E) and proline (P) are interspersed throughout the XTEN sequence, are located within or between the sequence motifs, or are concentrated in one or more short stretches of the XTEN sequence. In such cases where the XTEN component of the BFXTEN comprises amino acids other than glycine (G), alanine (A), serine (S), threonine (T), glutamate (E) and proline (P), it is preferred that the amino acids not be hydrophobic residues and should not substantially confer secondary structure of the XTEN component. Hydrophobic residues that are less favored in construction of XTEN include tryptophan, phenylalanine, tyrosine, leucine, isoleucine, valine, and methionine. Additionally, one can design the XTEN sequences to contain less than 5% or less than 4% or less than 3% or less than 2% or less than 1% or none of the following amino acids: cysteine (to avoid disulfide formation and oxidation), methionine (to avoid oxidation), asparagine and glutamine (to avoid desamidation). Thus, in some embodiments, the XTEN component of the BFXTEN fusion protein comprising other amino acids in addition to glycine (G), alanine (A), serine (S), threonine (T), glutamate (E) and proline (P) would have a sequence with less than 5% of the residues contributing to alpha-helices and beta-sheets as measured by the Chou-Fasman algorithm and have at least 90%, or at least about 95% or more random coil formation as measured by the GOR algorithm.

[0172] 3. Length of Sequence

[0173] In another aspect, the invention encompasses BFXTEN compositions comprising one or more XTEN polypeptides wherein the length of the XTEN sequences is selected based on the property or function to be achieved. In one embodiment, XTEN or fragments of XTEN are incorporated into the BFXTEN as a linker, with lengths of about 6 to about 150 amino acids joining components such as two BP or between a cleavage sequence and a BP and/or an XTEN. In another embodiment, one or more XTEN are incorporated into the BFXTEN as a carrier that can be inserted between two BP and/or can be inserted at the terminus of the BFXTEN fusion protein. When XTEN is used as a carrier, the embodiment takes advantage of the discovery that increasing the length of the non-repetitive, unstructured polypeptides enhances the unstructured nature of the XTENs and correspondingly enhances the biological and pharmacokinetic properties of fusion proteins comprising the XTEN carrier. As described more fully in the Examples, proportional increases in the length of the XTEN, even if created by a repeated order of single family sequence motifs (e.g., the four AE motifs of Table 3), result in a sequence with a higher percentage of random coil formation, as determined by GOR algorithm, or a low percentage of alpha-helices or beta-sheets, as determined by Chou-Fasman algorithm, compared to shorter XTEN lengths. In general, increasing the length of the unstructured polypeptide fusion partner, as described in the Examples, results in a fusion protein with a disproportionate increase in terminal half-life compared to fusion proteins with unstructured polypeptide partners with shorter sequence lengths. Depending on the intended function, XTEN or fragments of XTEN incorporated into BFXTEN can be about 6, or about 12, or about 36, or about 40, or about 100, or about 144, or about 288, or about 401, or about 500, or about 600, or about 700, or about 800, or about 900, or about 1000, or about 1500, or about 2000, or about 2500, or up to about 3000 amino acid residues in length. In other cases, the XTEN sequences can be about 6 to about 50, or about 100 to 150, about 150 to 250, about 250 to 400, about 400 to about 500, about 500 to 900, about 900 to 1500, about 1500 to 2000, or about 2000 to about 3000 amino acid residues in length. Non-limiting examples of XTEN contemplated for inclusion in the BFXTEN of the invention are presented in Tables 4 and 9-12, below. In the embodiments hereinabove described in this paragraph, the one or more XTEN sequences incorporated into BXTEN individually exhibit at least about 80% sequence identity, or alternatively 81%, 82%, 83%, 84%, 85%, 86%, 87%, 88%, 89%, 90%, 91%, 92%, 93%, 94%, 95%, 96%, 97%, 98%, 99%, or 100% sequence identity compared to an XTEN selected from Table 4 or Table 9 or Table 10 or Table 11 or Table 12, or a fragment thereof with comparable length. In one non-limiting example, the AG864 sequence of 864 amino acid residues can be truncated to yield an AG144 with 144 residues, an AG288 with 288 residues, an AG576 with 576 residues, or other intermediate lengths. It is specifically contemplated that such an approach can be utilized with any of the XTEN embodiments described herein or with any of the sequences listed in Tables 4 or 9-13 to result in XTEN of an intermediate length. Alternatively, in other embodiments, the BFXTEN comprise one or more XTEN wherein the individual XTEN are created by the linking together of sequence motifs selected from Table 3 and/or the 36-amino acid sequences of Tables 9-12 using the methods described herein. In one embodiment of the foregoing, the 12-amino acid motifs of Table 3 or the 36-amino acid sequences of Tables 9-12 would be selected from a single family of XTEN; e.g., AD, AE, AF, AG, AM, AQ, BC or BD. The invention also encompasses XTEN created by selecting sequences from two or more different XTEN families of the 12-amino acid motifs of Table 3 or the 36-amino acid sequences of Tables 9-12.

[0174] In other embodiments, the BFXTEN fusion protein comprises a first and a second XTEN sequence, wherein the cumulative total of the residues in the XTEN sequences is greater than about 400 to about 3000 amino acid residues and the XTEN can be identical or they can be different in sequence. As used herein, “cumulative length” is intended to encompass the total length, in amino acid residues, when more than one XTEN is used in the fusion protein. In embodiments of the foregoing, the BFXTEN fusion protein comprises a first and a second XTEN sequence wherein the sequences each exhibit at least about 80% sequence identity, or alternatively 81%, 82%, 83%, 84%, 85%, 86%, 87%, 88%, 89%, 90%, 91%, 92%, 93%, 94%, 95%, 96%, 97%, 98%, 99%, or 100% sequence identity compared to at least a first or additionally a second XTEN selected from Table 4. Examples where more than one XTEN is used in a BFXTEN composition include, but are not limited to constructs with an XTEN linked to both the N- and C-termini of at least one BP.

[0175] As described more fully below, methods are disclosed in which the BFXTEN is designed by selecting the length of the XTEN to confer a target half-life or other physicochemical property on a fusion protein administered to a subject. In general, XTEN cumulative lengths longer that about 400 residues incorporated into the BFXTEN compositions result in longer half-life compared to shorter cumulative lengths; e.g., shorter than about 280 residues. Thus, BFXTEN fusion proteins designs are contemplated that comprise a single XTEN with a long sequence length of at least about 288, or at least about 400, or at least about 600, or at least about 800, or at least about 1000 or more amino acids, or, in the alternative, multiple XTEN are incorporated into the fusion protein to achieve long cumulative lengths of at least about 288, or at least about 400, or at least about 600, or at least about 800, or at least about 1000 or more amino acids; either of which are designed to confer slower rates of systemic absorption, increased bioavailability, and increased half-life after subcutaneous or intramuscular administration to a subject compared to shorter XTEN lengths. In such embodiments, the Cₘₐₓ is reduced in comparison to a comparable dose of a BP not linked to XTEN, thereby contributing to the ability to keep the BFXTEN within the therapeutic window for the composition. Thus, the XTEN confers the property of a depot to the administered BFXTEN, in addition to the other physical/chemical properties described herein.

TABLE 4
XTEN Polypeptides

| XTEN | | SEQ ID |
|---|---|---|
| Name | Amino Acid Sequence | NO: |
| AE42_1 | TEPSEGSAPGSPAGSPTSTEEGTSESATPESGPGSEPATSGS | 90 |
| AE42_2 | PAGSPTSTEEGTSTEPSEGSAPGTSESATPESGPGSEPATSG | 91 |
| AE42_3 | SEPATSGSETPGTSESATPESGPGTSTEPSEGSAPGSPAGSP | 92 |
| AE43_4 | GSPGGSPAGSPTSTEEGTSESATPESGPGSEPATSGSETPGT | 93 |
| AE42_5 | GAPGSPAGSPTSTEEGTSESATPESGPGSEPATSGSETPGPA | 94 |
| AG42_1 | GAPSPSASTGTGPGTPGSGTASSSPGSSTPSGATGSPGPSGP | 95 |
| AG42_2 | GPGTPGSGTASSSPGSSTPSGATGSPGSSPSASTGTGPGASP | 96 |
| AG42_3 | SPSASTGTGPGASPGTSSTGSPGTPGSGTASSSPGSSTPSGA | 97 |
| AG42_4 | SASTGTGPGASPGTSSTGSPGTPGSGTASSSPGSSTPSGATG | 98 |
| AG42_5 | GAPGASPGTSSTGSPGSSPSASTGTGPGTPGSGTASSSPGPA | 99 |
| AG42_6 | GSPGGASPGTSSTGSPGSSPSASTGTGPGTPGSGTASSSPTG | 100 |
| AE48 | MAEPAGSPTSTEEGTPGSGTASSSPGSSTPSGATGSPGASPGTSSTGS | 101 |
| AM48 | MAEPAGSPTSTEEGASPGTSSTGSPGSSTPSGATGSPGSSTPSGATGS | 102 |
| AE144 | GSEPATSGSETPGTSESATPESGPGSEPATSGSETPGSPAGSPTSTEEGTSTEPSEGSAPG | 103 |
| | SEPATSGSETPGSEPATSGSETPGSEPATSGSETPGTSTEPSEGSAPGTSESATPESGPGS | |
| | EPATSGSETPGTSTEPSEGSAP | |
| AF144 | GTSTPESGSASPGTSPSGESSTAPGTSPSGESSTAPGSTSSTAESPGPGSTSESPSGTAPGS | 104 |
| | TSSTAESPGPGTSPSGESSTAPGTSTPESGSASPGSTSSTAESPGPGTSPSGESSTAPGTSP | |
| | SGESSTAPGTSPSGESSTAP | |
| AG144_ | PGSSPSASTGTGPGSSPSASTGTGPGTPGSGTASSSPGSSTPSGATGSPGSSPSASTGTGP | 105 |
| 1 | GASPGTSSTGSPGTPGSGTASSSPGSSTPSGATGSPGTPGSGTASSSPGASPGTSSTGSPG | |
| | ASPGTSSTGSPGTPGSGTASSS | |
| AG144_ | SGTASSSPGSSTPSGATGSPGTPGSGTASSSPGSSTPSGATGSPGSSTPSGATGSPGSSPS | 106 |
| 2 | ASTGTGPGSSPSASTGTGPGASPGTSSTGSPGTPGSGTASSSPGSSTPSGATGSPGSSPSA | |
| | STGTGPGSSPSASTGTGPGASP | |
| AG144_ | GTPGSGTASSSPGSSTPSGATGSPGSSTPSGATGSPGSSPSASTGTGPGSSPSASTGTGPG | 107 |
| 3 | ASPGTSSTGSPGTPGSGTASSSPGSSTPSGATGSPGSSPSASTGTGPGSSPSASTGTGPGA | |
| | SPGTSSTGSPGASPGTSSTGSP | |
| AG144_ | GTPGSGTASSSPGSSTPSGATGSPGSSPSASTGTGPGSSPSASTGTGPGASPGTSSTGSPG | 108 |
| 4 | ASPGTSSTGSPGSSTPSGATGSPGSSPSASTGTGPGASPGTSSTGSPGSSPSASTGTGPGT | |
| | PGSGTASSSPGSSTPSGATGSP | |
| AE288 | GTSESATPESGPGSEPATSGSETPGTSESATPESGPGSEPATSGSETPGTSESATPESGPG | 109 |
| | TSTEPSEGSAPGSPAGSPTSTEEGTSESATPESGPGSEPATSGSETPGTSESATPESGPGS | |
| | PAGSPTSTEEGSPAGSPTSTEEGTSTEPSEGSAPGTSESATPESGPGTSESATPESGPGTS | |
| | ESATPESGPGSEPATSGSETPGSEPATSGSETPGSPAGSPTSTEEGTSTEPSEGSAPGTST | |
| | EPSEGSAPGSEPATSGSETPGTSESATPESGPGTSTEPSEGSAP | |
| AG288_ | PGASPGTSSTGSPGASPGTSSTGSPGTPGSGTASSSPGSSTPSGATGSPGTPGSGTASSSP | 110 |
| 1 | GSSTPSGATGSPGTPGSGTASSSPGSSTPSGATGSPGSSTPSGATGSPGSSPSASTGTGPG | |
| | SSPSASTGTGPGASPGTSSTGSPGTPGSGTASSSPGSSTPSGATGSPGSSPSASTGTGPGS | |
| | SPSASTGTGPGASPGTSSTGSPGASPGTSSTGSPGSSTPSGATGSPGSSPSASTGTGPGAS | |
| | PGTSSTGSPGSSPSASTGTGPGTPGSGTASSSPGSSTPSGATGS | |
| AG288_ | GSSPSASTGTGPGSSPSASTGTGPGTPGSGTASSSPGSSTPSGATGSPGSSPSASTGTGPG | 111 |
| 2 | ASPGTSSTGSPGTPGSGTASSSPGSSTPSGATGSPGTPGSGTASSSPGASPGTSSTGSPGA | |
| | SPGTSSTGSPGTPGSGTASSSPGSSTPSGATGSPGASPGTSSTGSPGTPGSGTASSSPGSS | |
| | TPSGATGSPGSSPSASTGTGPGSSPSASTGTGPGSSTPSGATGSPGSSTPSGATGSPGASP | |
| | GTSSTGSPGASPGTSSTGSPGASPGTSSTGSPGTPGSGTASSSP | |
| AF504 | GASPGTSSTGSPGSSPSASTGTGPGSSPSASTGTGPGTPGSGTASSSPGSSTPSGATGSPG | 112 |
| | SXPSASTGTGPGASPGTSSTGSPGTPGSGTASSSPGSSTPSGATGSPGTPGSGTASSSPG | |
| | ASPGTSSTGSPGASPGTSSTGSPGTPGSGTASSSPGSSTPSGATGSPGASPGTSSTGSPGT | |
| | PGSGTASSSPGSSTPSGATGSPGSXPSASTGTGPGSSPSASTGTGPGSSTPSGATGSPGSS | |
| | TPSGATGSPGASPGTSSTGSPGASPGTSSTGSPGASPGTSSTGSPGTPGSGTASSSPGASP | |
| | GTSSTGSPGASPGTSSTGSPGASPGTSSTGSPGSSPSASTGTGPGTPGSGTASSSPGASPG | |
| | TSSTGSPGASPGTSSTGSPGASPGTSSTGSPGSSTPSGATGSPGSSTPSGATGSPGASPGT | |
| | SSTGSPGTPGSGTASSSPGSSTPSGATGSPGSSTPSGATGSPGSSTPSGATGSPGSSPSAS | |
| | TGTGPGASPGTSSTGSP | |
| AF540 | GSTSSTAESPGPGSTSSTAESPGPGSTSESPSGTAPGSTSSTAESPGPGSTSSTAESPGPG | 113 |
| | TSTPESGSASPGSTSESPSGTAPGTSPSGESSTAPGSTSESPSGTAPGSTSESPSGTAPGTS | |
| | PSGESSTAPGSTSESPSGTAPGSTSESPSGTAPGTSPSGESSTAPGSTSESPSGTAPGSTSE | |
| | SPSGTAPGSTSESPSGTAPGTSTPESGSASPGSTSESPSGTAPGTSTPESGSASPGSTSSTA | |
| | ESPGPGSTSSTAESPGPGTSTPESGSASPGTSTPESGSASPGSTSESPSGTAPGTSTPESGS | |
| | ASPGTSTPESGSASPGSTSESPSGTAPGSTSESPSGTAPGSTSESPSGTAPGSTSSTAESPG | |
| | PGTSTPESGSASPGTSTPESGSASPGSTSESPSGTAPGSTSESPSGTAPGTSTPESGSASPG | |
| | STSESPSGTAPGSTSESPSGTAPGTSTPESGSASPGTSPSGESSTAPGSTSSTAESPGPGTS | |
| | PSGESSTAPGSTSSTAESPGPGTSTPESGSASPGSTSESPSGTAP | |
| AD576 | GSSESGSSEGGPGSGGEPSESGSSGSSESGSSEGGPGSSESGSSEGGPGSSESGSSEGGPG | 114 |
| | SSESGSSEGGPGSSESGSSEGGPGESPGGSSGSESGSEGSSGPGESSGSSESGSSEGGPGS | |
| | SESGSSEGGPGSSESGSSEGGPGSGGEPSESGSSGESPGGSSGSESGESPGGSSGSESGSG | |
| | GEPSESGSSGSSESGSSEGGPGSGGEPSESGSSGSGGEPSESGSSGSEGSSGPGESSGESP | |
| | GGSSGSESGSGGEPSESGSSGSGGEPSESGSSGSGGEPSESGSSGSSESGSSEGGPGESPG | |
| | GSSGSESGESPGGSSGSESGESPGGSSGSESGESPGGSSGSESGESPGGSSGSESGSSESG | |
| | SSEGGPGSGGEPSESGSSGSEGSSGPGESSGSSESGSSEGGPGSGGEPSESGSSGSSESGS | |
| | SEGGPGSGGEPSESGSSGESPGGSSGSESGESPGGSSGSESGSSESGSSEGGPGSGGEPS | |
| | ESGSSGSSESGSSEGGPGSGGEPSESGSSGSGGEPSESGSSGESPGGSSGSESGSEGSSGP | |
| | GESSGSSESGSSEGGPGSEGSSGPGESS | |
| AE576 | GSPAGSPTSTEEGTSESATPESGPGTSTEPSEGSAPGSPAGSPTSTEEGTSTEPSEGSAPG | 115 |
| | TSTEPSEGSAPGTSESATPESGPGSEPATSGSETPGSEPATSGSETPGSPAGSPTSTEEGT | |
| | SESATPESGPGTSTEPSEGSAPGTSTEPSEGSAPGSPAGSPTSTEEGTSTEPSEGSAPGTS | |
| | TEPSEGSAPGTSESATPESGPGTSTEPSEGSAPGTSESATPESGPGSEPATSGSETPGTST | |
| | EPSEGSAPGTSTEPSEGSAPGTSESATPESGPGTSESATPESGPGSPAGSPTSTEEGTSES | |
| | ATPESGPGSEPATSGSETPGTSESATPESGPGTSTEPSEGSAPGTSTEPSEGSAPGTSTEP | |
| | SEGSAPGTSTEPSEGSAPGTSTEPSEGSAPGTSTEPSEGSAPGSPAGSPTSTEEGTSTEPS | |
| | EGSAPGTSESATPESGPGSEPATSGSETPGTSESATPESGPGSEPATSGSETPGTSESATP | |
| | ESGPGTSTEPSEGSAPGTSESATPESGPGSPAGSPTSTEEGSPAGSPTSTEEGSPAGSPTS | |
| | TEEGTSESATPESGPGTSTEPSEGSAP | |
| AF576 | GSTSSTAESPGPGSTSSTAESPGPGSTSESPSGTAPGSTSSTAESPGPGSTSSTAESPGPG | 116 |
| | TSTPESGSASPGSTSESPSGTAPGTSPSGESSTAPGSTSESPSGTAPGSTSESPSGTAPGTS | |
| | PSGESSTAPGSTSESPSGTAPGSTSESPSGTAPGTSPSGESSTAPGSTSESPSGTAPGSTSE | |
| | SPSGTAPGSTSESPSGTAPGTSTPESGSASPGSTSESPSGTAPGTSTPESGSASPGSTSSTA | |
| | ESPGPGSTSSTAESPGPGTSTPESGSASPGTSTPESGSASPGSTSESPSGTAPGTSTPESGS | |
| | ASPGTSTPESGSASPGSTSESPSGTAPGSTSESPSGTAPGSTSESPSGTAPGSTSSTAESPG | |
| | PGTSTPESGSASPGTSTPESGSASPGSTSESPSGTAPGSTSESPSGTAPGTSTPESGSASPG | |
| | STSESPSGTAPGSTSESPSGTAPGTSTPESGSASPGTSPSGESSTAPGSTSSTAESPGPGTS | |
| | PSGESSTAPGSTSSTAESPGPGTSTPESGSASPGSTSESPSGTAPGSTSSTAESPGPGTSTP | |
| | ESGSASPGTSTPESGSASP | |
| AG576 | PGTPGSGTASSSPGSSTPSGATGSPGSSPSASTGTGPGSSPSASTGTGPGSSTPSGATGSP | 117 |
| | GSSTPSGATGSPGASPGTSSTGSPGASPGTSSTGSPGASPGTSSTGSPGTPGSGTASSSPG | |
| | ASPGTSSTGSPGASPGTSSTGSPGASPGTSSTGSPGSSPSASTGTGPGTPGSGTASSSPGA | |
| | SPGTSSTGSPGASPGTSSTGSPGASPGTSSTGSPGSSTPSGATGSPGSSTPSGATGSPGAS | |
| | PGTSSTGSPGTPGSGTASSSPGSSTPSGATGSPGSSTPSGATGSPGSSTPSGATGSPGSSP | |
| | SASTGTGPGASPGTSSTGSPGASPGTSSTGSPGTPGSGTASSSPGASPGTSSTGSPGASP | |
| | GTSSTGSPGASPGTSSTGSPGASPGTSSTGSPGTPGSGTASSSPGSSTPSGATGSPGTPGS | |
| | GTASSSPGSSTPSGATGSPGTPGSGTASSSPGSSTPSGATGSPGSSTPSGATGSPGSSPSA | |
| | STGTGPGSSPSASTGTGPGASPGTSSTGSPGTPGSGTASSSPGSSTPSGATGSPGSSPSAS | |
| | TGTGPGSSPSASTGTGPGASPGTSSTGS | |
| AE624 | MAEPAGSPTSTEEGTPGSGTASSSPGSSTPSGATGSPGASPGTSSTGSPGSPAGSPTSTE | 118 |
| | EGTSESATPESGPGTSTEPSEGSAPGSPAGSPTSTEEGTSTEPSEGSAPGTSTEPSEGSAP | |
| | GTSESATPESGPGSEPATSGSETPGSEPATSGSETPGSPAGSPTSTEEGTSESATPESGPG | |
| | TSTEPSEGSAPGTSTEPSEGSAPGSPAGSPTSTEEGTSTEPSEGSAPGTSTEPSEGSAPGT | |
| | SESATPESGPGTSTEPSEGSAPGTSESATPESGPGSEPATSGSETPGTSTEPSEGSAPGTS | |
| | TEPSEGSAPGTSESATPESGPGTSESATPESGPGSPAGSPTSTEEGTSESATPESGPGSEP | |
| | ATSGSETPGTSESATPESGPGTSTEPSEGSAPGTSTEPSEGSAPGTSTEPSEGSAPGTSTE | |
| | PSEGSAPGTSTEPSEGSAPGTSTEPSEGSAPGSPAGSPTSTEEGTSTEPSEGSAPGTSESA | |
| | TPESGPGSEPATSGSETPGTSESATPESGPGSEPATSGSETPGTSESATPESGPGTSTEPS | |
| | EGSAPGTSESATPESGPGSPAGSPTSTEEGSPAGSPTSTEEGSPAGSPTSTEEGTSESATP | |
| | ESGPGTSTEPSEGSAP | |
| AD836 | GSSESGSSEGGPGSSESGSSEGGPGESPGGSSGSESGSGGEPSESGSSGESPGGSSGSESG | 119 |
| | ESPGGSSGSESGSSESGSSEGGPGSSESGSSEGGPGSSESGSSEGGPGESPGGSSGSESGE | |
| | SPGGSSGSESGESPGGSSGSESGSSESGSSEGGPGSSESGSSEGGPGSSESGSSEGGPGSS | |
| | ESGSSEGGPGSSESGSSEGGPGSSESGSSEGGPGSGGEPSESGSSGESPGGSSGSESGESP | |
| | GGSSGSESGSGGEPSESGSSGSEGSSGPGESSGSSESGSSEGGPGSGGEPSESGSSGSEGS | |
| | SGPGESSGSSESGSSEGGPGSGGEPSESGSSGESPGGSSGSESGSGGEPSESGSSGSGGEP | |
| | SESGSSGSSESGSSEGGPGSGGEPSESGSSGSGGEPSESGSSGSEGSSGPGESSGESPGGS | |
| | SGSESGSEGSSGPGESSGSEGSSGPGESSGSGGEPSESGSSGSSESGSSEGGPGSSESGSS | |
| | EGGPGESPGGSSGSESGSGGEPSESGSSGSEGSSGPGESSGESPGGSSGSESGSEGSSGP | |
| | GSSESGSSEGGPGSGGEPSESGSSGSEGSSGPGESSGSEGSSGPGESSGSEGSSGPGESSG | |
| | SGGEPSESGSSGSGGEPSESGSSGESPGGSSGSESGESPGGSSGSESGSGGEPSESGSSGS | |
| | EGSSGPGESSGESPGGSSGSESGSSESGSSEGGPGSSESGSSEGGPGSSESGSSEGGPGSG | |
| | GEPSESGSSGSSESGSSEGGPGESPGGSSGSESGSGGEPSESGSSGSSESGSSEGGPGESP | |
| | GGSSGSESGSGGEPSESGSSGESPGGSSGSESGSGGEPSESGSS | |
| AE864 | GSPAGSPTSTEEGTSESATPESGPGTSTEPSEGSAPGSPAGSPTSTEEGTSTEPSEGSAPG | 120 |
| | TSTEPSEGSAPGTSESATPESGPGSEPATSGSETPGSEPATSGSETPGSPAGSPTSTEEGT | |
| | SESATPESGPGTSTEPSEGSAPGTSTEPSEGSAPGSPAGSPTSTEEGTSTEPSEGSAPGTS | |
| | TEPSEGSAPGTSESATPESGPGTSTEPSEGSAPGTSESATPESGPGSEPATSGSETPGTST | |
| | EPSEGSAPGTSTEPSEGSAPGTSESATPESGPGTSESATPESGPGSPAGSPTSTEEGTSES | |
| | ATPESGPGSEPATSGSETPGTSESATPESGPGTSTEPSEGSAPGTSTEPSEGSAPGTSTEP | |
| | SEGSAPGTSTEPSEGSAPGTSTEPSEGSAPGTSTEPSEGSAPGSPAGSPTSTEEGTSTEPS | |
| | EGSAPGTSESATPESGPGSEPATSGSETPGTSESATPESGPGSEPATSGSETPGTSESATP | |
| | ESGPGTSTEPSEGSAPGTSESATPESGPGSPAGSPTSTEEGSPAGSPTSTEEGSPAGSPTS | |
| | TEEGTSESATPESGPGTSTEPSEGSAPGTSESATPESGPGSEPATSGSETPGTSESATPES | |
| | GPGSEPATSGSETPGTSESATPESGPGTSTEPSEGSAPGSPAGSPTSTEEGTSESATPESG | |
| | PGSEPATSGSETPGTSESATPESGPGSPAGSPTSTEEGSPAGSPTSTEEGTSTEPSEGSAP | |
| | GTSESATPESGPGTSESATPESGPGTSESATPESGPGSEPATSGSETPGSEPATSGSETPG | |
| | SPAGSPTSTEEGTSTEPSEGSAPGTSTEPSEGSAPGSEPATSGSETPGTSESATPESGPGT | |
| | STEPSEGSAP | |
| AF864 | GSTSESPSGTAPGTSPSGESSTAPGSTSESPSGTAPGSTSESPSGTAPGTSTPESGSASPG | 121 |
| | TSTPESGSASPGSTSESPSGTAPGSTSESPSGTAPGTSPSGESSTAPGSTSESPSGTAPGTS | |
| | PSGESSTAPGTSPSGESSTAPGSTSSTAESPGPGTSPSGESSTAPGTSPSGESSTAPGSTSS | |
| | TAESPGPGTSTPESGSASPGTSTPESGSASPGSTSESPSGTAPGSTSESPSGTAPGTSTPES | |
| | GSASPGSTSSTAESPGPGTSTPESGSASPGSTSESPSGTAPGTSPSGESSTAPGSTSSTAES | |
| | PGPGTSPSGESSTAPGTSTPESGSASPGSTSSTAESPGPGSTSSTAESPGPGSTSSTAESPG | |
| | PGSTSSTAESPGPGTSPSGESSTAPGSTSESPSGTAPGSTSESPSGTAPGTSTPESGPXXX | |
| | GASASGAPSTXXXXSESPSGTAPGSTSESPSGTAPGSTSESPSGTAPGSTSESPSGTAPG | |
| | STSESPSGTAPGSTSESPSGTAPGTSTPESGSASPGTSPSGESSTAPGTSPSGESSTAPGST | |
| | SSTAESPGPGTSPSGESSTAPGTSTPESGSASPGSTSESPSGTAPGSTSESPSGTAPGTSPS | |
| | GESSTAPGSTSESPSGTAPGTSTPESGSASPGTSTPESGSASPGSTSESPSGTAPGTSTPES | |
| | GSASPGSTSSTAESPGPGSTSESPSGTAPGSTSESPSGTAPGTSPSGESSTAPGSTSSTAES | |
| | PGPGTSPSGESSTAPGTSTPESGSASPGTSPSGESSTAPGTSPSGESSTAPGTSPSGESSTA | |
| | PGSTSSTAESPGPGSTSSTAESPGPGTSPSGESSTAPGSSPSASTGTGPGSSTPSGATGSP | |
| | GSSTPSGATGSP | |
| AG864 | GASPGTSSTGSPGSSPSASTGTGPGSSPSASTGTGPGTPGSGTASSSPGSSTPSGATGSPG | 122 |
| | SSPSASTGTGPGASPGTSSTGSPGTPGSGTASSSPGSSTPSGATGSPGTPGSGTASSSPGA | |
| | SPGTSSTGSPGASPGTSSTGSPGTPGSGTASSSPGSSTPSGATGSPGASPGTSSTGSPGTP | |
| | GSGTASSSPGSSTPSGATGSPGSSPSASTGTGPGSSPSASTGTGPGSSTPSGATGSPGSST | |
| | PSGATGSPGASPGTSSTGSPGASPGTSSTGSPGASPGTSSTGSPGTPGSGTASSSPGASP | |
| | GTSSTGSPGASPGTSSTGSPGASPGTSSTGSPGSSPSASTGTGPGTPGSGTASSSPGASPG | |
| | TSSTGSPGASPGTSSTGSPGASPGTSSTGSPGSSTPSGATGSPGSSTPSGATGSPGASPGT | |
| | SSTGSPGTPGSGTASSSPGSSTPSGATGSPGSSTPSGATGSPGSSTPSGATGSPGSSPSAS | |
| | TGTGPGASPGTSSTGSPGASPGTSSTGSPGTPGSGTASSSPGASPGTSSTGSPGASPGTS | |
| | STGSPGASPGTSSTGSPGASPGTSSTGSPGTPGSGTASSSPGSSTPSGATGSPGTPGSGT | |
| | ASSSPGSSTPSGATGSPGTPGSGTASSSPGSSTPSGATGSPGSSTPSGATGSPGSSPSAST | |
| | GTGPGSSPSASTGTGPGASPGTSSTGSPGTPGSGTASSSPGSSTPSGATGSPGSSPSASTG | |
| | TGPGSSPSASTGTGPGASPGTSSTGSPGASPGTSSTGSPGSSTPSGATGSPGSSPSASTGT | |
| | GPGASPGTSSTGSPGSSPSASTGTGPGTPGSGTASSSPGSSTPSGATGSPGSSTPSGATGS | |
| | PGASPGTSSTGSP | |
| AM875 | GTSTEPSEGSAPGSEPATSGSETPGSPAGSPTSTEEGSTSSTAESPGPGTSTPESGSASPG | 123 |
| | STSESPSGTAPGSTSESPSGTAPGTSTPESGSASPGTSTPESGSASPGSEPATSGSETPGTS | |
| | ESATPESGPGSPAGSPTSTEEGTSTEPSEGSAPGTSESATPESGPGTSTEPSEGSAPGTST | |
| | EPSEGSAPGSPAGSPTSTEEGTSTEPSEGSAPGTSTEPSEGSAPGTSESATPESGPGTSES | |
| | ATPESGPGTSTEPSEGSAPGTSTEPSEGSAPGTSESATPESGPGTSTEPSEGSAPGSEPAT | |
| | SGSETPGSPAGSPTSTEEGSSTPSGATGSPGTPGSGTASSSPGSSTPSGATGSPGTSTEPS | |
| | EGSAPGTSTEPSEGSAPGSEPATSGSETPGSPAGSPTSTEEGSPAGSPTSTEEGTSTEPSE | |
| | GSAPGASASGAPSTGGTSESATPESGPGSPAGSPTSTEEGSPAGSPTSTEEGSTSSTAESP | |
| | GPGSTSESPSGTAPGTSPSGESSTAPGTPGSGTASSSPGSSTPSGATGSPGSSPSASTGTG | |
| | PGSEPATSGSETPGTSESATPESGPGSEPATSGSETPGSTSSTAESPGPGSTSSTAESPGP | |
| | GTSPSGESSTAPGSEPATSGSETPGSEPATSGSETPGTSTEPSEGSAPGSTSSTAESPGPG | |
| | TSTPESGSASPGSTSESPSGTAPGTSTEPSEGSAPGTSTEPSEGSAPGTSTEPSEGSAPGSS | |
| | TPSGATGSPGSSPSASTGTGPGASPGTSSTGSPGSEPATSGSETPGTSESATPESGPGSPA | |
| | GSPTSTEEGSSTPSGATGSPGSSPSASTGTGPGASPGTSSTGSPGTSESATPESGPGTSTE | |
| | PSEGSAPGTSTEPSEGSAP | |
| AE912 | MAEPAGSPTSTEEGTPGSGTASSSPGSSTPSGATGSPGASPGTSSTGSPGSPAGSPTSTE | 124 |
| | EGTSESATPESGPGTSTEPSEGSAPGSPAGSPTSTEEGTSTEPSEGSAPGTSTEPSEGSAP | |
| | GTSESATPESGPGSEPATSGSETPGSEPATSGSETPGSPAGSPTSTEEGTSESATPESGPG | |
| | TSTEPSEGSAPGTSTEPSEGSAPGSPAGSPTSTEEGTSTEPSEGSAPGTSTEPSEGSAPGT | |
| | SESATPESGPGTSTEPSEGSAPGTSESATPESGPGSEPATSGSETPGTSTEPSEGSAPGTS | |
| | TEPSEGSAPGTSESATPESGPGTSESATPESGPGSPAGSPTSTEEGTSESATPESGPGSEP | |
| | ATSGSETPGTSESATPESGPGTSTEPSEGSAPGTSTEPSEGSAPGTSTEPSEGSAPGTSTE | |
| | PSEGSAPGTSTEPSEGSAPGTSTEPSEGSAPGSPAGSPTSTEEGTSTEPSEGSAPGTSESA | |
| | TPESGPGSEPATSGSETPGTSESATPESGPGSEPATSGSETPGTSESATPESGPGTSTEPS | |
| | EGSAPGTSESATPESGPGSPAGSPTSTEEGSPAGSPTSTEEGSPAGSPTSTEEGTSESATP | |
| | ESGPGTSTEPSEGSAPGTSESATPESGPGSEPATSGSETPGTSESATPESGPGSEPATSGS | |
| | ETPGTSESATPESGPGTSTEPSEGSAPGSPAGSPTSTEEGTSESATPESGPGSEPATSGSE | |
| | TPGTSESATPESGPGSPAGSPTSTEEGSPAGSPTSTEEGTSTEPSEGSAPGTSESATPESG | |
| | PGTSESATPESGPGTSESATPESGPGSEPATSGSETPGSEPATSGSETPGSPAGSPTSTEE | |
| | GTSTEPSEGSAPGTSTEPSEGSAPGSEPATSGSETPGTSESATPESGPGTSTEPSEGSAP | |
| AM923 | MAEPAGSPTSTEEGASPGTSSTGSPGSSTPSGATGSPGSSTPSGATGSPGTSTEPSEGSA | 125 |
| | PGSEPATSGSETPGSPAGSPTSTEEGSTSSTAESPGPGTSTPESGSASPGSTSESPSGTAP | |
| | GSTSESPSGTAPGTSTPESGSASPGTSTPESGSASPGSEPATSGSETPGTSESATPESGPG | |
| | SPAGSPTSTEEGTSTEPSEGSAPGTSESATPESGPGTSTEPSEGSAPGTSTEPSEGSAPGS | |
| | PAGSPTSTEEGTSTEPSEGSAPGTSTEPSEGSAPGTSESATPESGPGTSESATPESGPGTS | |
| | TEPSEGSAPGTSTEPSEGSAPGTSESATPESGPGTSTEPSEGSAPGSEPATSGSETPGSPA | |
| | GSPTSTEEGSSTPSGATGSPGTPGSGTASSSPGSSTPSGATGSPGTSTEPSEGSAPGTSTE | |
| | PSEGSAPGSEPATSGSETPGSPAGSPTSTEEGSPAGSPTSTEEGTSTEPSEGSAPGASASG | |
| | APSTGGTSESATPESGPGSPAGSPTSTEEGSPAGSPTSTEEGSTSSTAESPGPGSTSESPS | |
| | GTAPGTSPSGESSTAPGTPGSGTASSSPGSSTPSGATGSPGSSPSASTGTGPGSEPATSGS | |
| | ETPGTSESATPESGPGSEPATSGSETPGSTSSTAESPGPGSTSSTAESPGPGTSPSGESST | |
| | APGSEPATSGSETPGSEPATSGSETPGTSTEPSEGSAPGSTSSTAESPGPGTSTPESGSAS | |
| | PGSTSESPSGTAPGTSTEPSEGSAPGTSTEPSEGSAPGTSTEPSEGSAPGSSTPSGATGSP | |
| | GSSPSASTGTGPGASPGTSSTGSPGSEPATSGSETPGTSESATPESGPGSPAGSPTSTEEG | |
| | SSTPSGATGSPGSSPSASTGTGPGASPGTSSTGSPGTSESATPESGPGTSTEPSEGSAPGT | |
| | STEPSEGSAP | |
| AM1318 | GTSTEPSEGSAPGSEPATSGSETPGSPAGSPTSTEEGSTSSTAESPGPGTSTPESGSASPG | 126 |
| | STSESPSGTAPGSTSESPSGTAPGTSTPESGSASPGTSTPESGSASPGSEPATSGSETPGTS | |
| | ESATPESGPGSPAGSPTSTEEGTSTEPSEGSAPGTSESATPESGPGTSTEPSEGSAPGTST | |
| | EPSEGSAPGSPAGSPTSTEEGTSTEPSEGSAPGTSTEPSEGSAPGTSESATPESGPGTSES | |
| | ATPESGPGTSTEPSEGSAPGTSTEPSEGSAPGTSESATPESGPGTSTEPSEGSAPGSEPAT | |
| | SGSETPGSPAGSPTSTEEGSSTPSGATGSPGTPGSGTASSSPGSSTPSGATGSPGTSTEPS | |
| | EGSAPGTSTEPSEGSAPGSEPATSGSETPGSPAGSPTSTEEGSPAGSPTSTEEGTSTEPSE | |
| | GSAPGPEPTGPAPSGGSEPATSGSETPGTSESATPESGPGSPAGSPTSTEEGTSESATPES | |
| | GPGSPAGSPTSTEEGSPAGSPTSTEEGTSESATPESGPGSPAGSPTSTEEGSPAGSPTSTE | |
| | EGSTSSTAESPGPGSTSESPSGTAPGTSPSGESSTAPGSTSESPSGTAPGSTSESPSGTAP | |
| | GTSPSGESSTAPGTSTEPSEGSAPGTSESATPESGPGTSESATPESGPGSEPATSGSETPG | |
| | TSESATPESGPGTSESATPESGPGTSTEPSEGSAPGTSESATPESGPGTSTEPSEGSAPGT | |
| | SPSGESSTAPGTSPSGESSTAPGTSPSGESSTAPGTSTEPSEGSAPGSPAGSPTSTEEGTST | |
| | EPSEGSAPGSSPSASTGTGPGSSTPSGATGSPGSSTPSGATGSPGSSTPSGATGSPGSSTP | |
| | SGATGSPGASPGTSSTGSPGASASGAPSTGGTSPSGESSTAPGSTSSTAESPGPGTSPSG | |
| | ESSTAPGTSESATPESGPGTSTEPSEGSAPGTSTEPSEGSAPGSSPSASTGTGPGSSTPSG | |
| | ATGSPGASPGTSSTGSPGTSTPESGSASPGTSPSGESSTAPGTSPSGESSTAPGTSESATP | |
| | ESGPGSEPATSGSETPGTSTEPSEGSAPGSTSESPSGTAPGSTSESPSGTAPGTSTPESGS | |
| | ASPGSPAGSPTSTEEGTSESATPESGPGTSTEPSEGSAPGSPAGSPTSTEEGTSESATPES | |
| | GPGSEPATSGSETPGSSTPSGATGSPGASPGTSSTGSPGSSTPSGATGSPGSTSESPSGTA | |
| | PGTSPSGESSTAPGSTSSTAESPGPGSSTPSGATGSPGASPGTSSTGSPGTPGSGTASSSP | |
| | GSPAGSPTSTEEGSPAGSPTSTEEGTSTEPSEGSAP | |
| BC 864 | GTSTEPSEPGSAGTSTEPSEPGSAGSEPATSGTEPSGSGASEPTSTEPGSEPATSGTEPSG | 127 |
| | SEPATSGTEPSGSEPATSGTEPSGSGASEPTSTEPGTSTEPSEPGSAGSEPATSGTEPSGT | |
| | STEPSEPGSAGSEPATSGTEPSGSEPATSGTEPSGTSTEPSEPGSAGTSTEPSEPGSAGSE | |
| | PATSGTEPSGSEPATSGTEPSGTSEPSTSEPGAGSGASEPTSTEPGTSEPSTSEPGAGSEP | |
| | ATSGTEPSGSEPATSGTEPSGTSTEPSEPGSAGTSTEPSEPGSAGSGASEPTSTEPGSEPA | |
| | TSGTEPSGSEPATSGTEPSGSEPATSGTEPSGSEPATSGTEPSGTSTEPSEPGSAGSEPAT | |
| | SGTEPSGSGASEPTSTEPGTSTEPSEPGSAGSEPATSGTEPSGSGASEPTSTEPGTSTEPS | |
| | EPGSAGSGASEPTSTEPGSEPATSGTEPSGSGASEPTSTEPGSEPATSGTEPSGSGASEPT | |
| | STEPGTSTEPSEPGSAGSEPATSGTEPSGSGASEPTSTEPGTSTEPSEPGSAGSEPATSGT | |
| | EPSGTSTEPSEPGSAGSEPATSGTEPSGTSTEPSEPGSAGTSTEPSEPGSAGTSTEPSEPGS | |
| | AGTSTEPSEPGSAGTSTEPSEPGSAGTSTEPSEPGSAGTSEPSTSEPGAGSGASEPTSTEP | |
| | GTSTEPSEPGSAGTSTEPSEPGSAGTSTEPSEPGSAGSEPATSGTEPSGSGASEPTSTEPG | |
| | SEPATSGTEPSGSEPATSGTEPSGSEPATSGTEPSGSEPATSGTEPSGTSEPSTSEPGAGS | |
| | EPATSGTEPSGSGASEPTSTEPGTSTEPSEPGSAGSEPATSGTEPSGSGASEPTSTEPGTS | |
| | TEPSEPGSA | |
| BD864 | GSETATSGSETAGTSESATSESGAGSTAGSETSTEAGTSESATSESGAGSETATSGSETA | 128 |
| | GSETATSGSETAGTSTEASEGSASGTSTEASEGSASGTSESATSESGAGSETATSGSETA | |
| | GTSTEASEGSASGSTAGSETSTEAGTSESATSESGAGTSESATSESGAGSETATSGSETA | |
| | GTSESATSESGAGTSTEASEGSASGSETATSGSETAGSETATSGSETAGTSTEASEGSAS | |
| | GSTAGSETSTEAGTSESATSESGAGTSTEASEGSASGSETATSGSETAGSTAGSETSTEA | |
| | GSTAGSETSTEAGSETATSGSETAGTSESATSESGAGTSESATSESGAGSETATSGSETA | |
| | GTSESATSESGAGTSESATSESGAGSETATSGSETAGSETATSGSETAGTSTEASEGSAS | |
| | GSTAGSETSTEAGSETATSGSETAGTSESATSESGAGSTAGSETSTEAGSTAGSETSTE | |
| | AGSTAGSETSTEAGTSTEASEGSASGSTAGSETSTEAGSTAGSETSTEAGTSTEASEGS | |
| | ASGSTAGSETSTEAGSETATSGSETAGTSTEASEGSASGTSESATSESGAGSETATSGSE | |
| | TAGTSESATSESGAGTSESATSESGAGSETATSGSETAGTSESATSESGAGSETATSGSE | |
| | TAGTSTEASEGSASGTSTEASEGSASGSTAGSETSTEAGSTAGSETSTEAGSETATSGSE | |
| | TAGTSESATSESGAGTSESATSESGAGSETATSGSETAGSETATSGSETAGSETATSGSE | |
| | TAGTSTEASEGSASGTSESATSESGAGSETATSGSETAGSETATSGSETAGTSESATSES | |
| | GAGTSESATSESGAGSETATSGSETA | |
| Y288 | GEGSGEGSEGEGSEGSGEGEGSEGSGEGEGGSEGSEGEGGSEGSEGEGGSEGSEGEGS | 129 |
| | GEGSEGEGGSEGSEGEGSGEGSEGEGSEGGSEGEGGSEGSEGEGSGEGSEGEGGEGGS | |
| | EGEGSEGSGEGEGSGEGSEGEGSEGSGEGEGSGEGSEGEGSEGSGEGEGSEGSGEGEG | |
| | GSEGSEGEGSEGSGEGEGGEGSGEGEGSGEGSEGEGGGEGSEGEGSGEGGEGEGSEG | |
| | GSEGEGGSEGGEGEGSEGSGEGEGSEGGSEGEGSEGGSEGEGSEGSGEGEGSEGSGE | |
| Y576 | GEGSGEGSEGEGSEGSGEGEGSEGSGEGEGGSEGSEGEGSEGSGEGEGGEGSGEGEGS | 130 |
| | GEGSEGEGGGEGSEGEGSGEGGEGEGSEGGSEGEGGSEGGEGEGSEGSGEGEGSEGG | |
| | SEGEGSEGGSEGEGSEGSGEGEGSEGSGEGEGSEGSGEGEGSEGSGEGEGSEGGSEGE | |
| | GGSEGSEGEGSGEGSEGEGGSEGSEGEGGGEGSEGEGSGEGSEGEGGSEGSEGEGGSE | |
| | GSEGEGGEGSGEGEGSEGSGEGEGSGEGSEGEGSEGSGEGEGSEGSGEGEGGSEGSEG | |
| | EGSGEGSEGEGSEGSGEGEGSEGSGEGEGGSEGSEGEGGSEGSEGEGGSEGSEGEGGE | |
| | GSGEGEGSEGSGEGEGSGEGSEGEGSEGSGEGEGSEGSGEGEGGSEGSEGEGSEGSGE | |
| | GEGGEGSGEGEGSGEGSEGEGGGEGSEGEGSEGSGEGEGSEGSGEGEGSEGGSEGEG | |
| | GSEGSEGEGSEGGSEGEGSEGGSEGEGSEGSGEGEGSEGSGEGEGSGEGSEGEGGSEG | |
| | GEGEGSEGGSEGEGSEGGSEGEGGEGSGEGEGGGEGSEGEGSEGSGEGEGSGEGSE | |

[0176] 4. N-Terminal XTEN Expression-Enhancing Sequences

[0177] In some embodiments, the invention provides a short-length XTEN sequence incorporated as the N-terminal portion of the BFXTEN fusion protein. It has been discovered that the expression of the fusion protein is enhanced in a host cell transformed with a suitable expression vector comprising an optimized N-terminal leader polynucleotide sequence (that encodes the N-terminal XTEN) incorporated into the polynucleotide encoding the binding fusion protein. As described in Examples 14-17, a host cell transformed with such an expression vector comprising an optimized N-terminal leader sequence (NTS) in the binding fusion protein gene results in greatly-enhanced expression of the fusion protein compared to the expression of a corresponding fusion protein from a polynucleotide not comprising the NTS, and obviates the need for incorporation of a non-XTEN leader sequence used to enhance expression. In one embodiment, the invention provides BFXTEN fusion proteins comprising an NTS wherein the expression of the binding fusion protein from the encoding gene in a host cell is enhanced about 50%, or about 75%, or about 100%, or about 150%, or about 200%, or about 400% compared to expression of a BFXTEN fusion protein not comprising the N-terminal XTEN sequence (where the encoding gene lacks the NTS).

[0178] In one embodiment, the N-terminal XTEN polypeptide of the BFXTEN comprises a sequence that exhibits at least about 80%, more preferably at least about 90%, more preferably at least about 91%, more preferably at least about 92%, more preferably at least about 93%, more preferably at least about 94%, more preferably at least about 95%, more preferably at least about 96%, more preferably at least about 97%, more preferably at least about 98%, more preferably at least 99%, or exhibits 100% sequence identity compared to the amino acid sequence of AE48 or AM48, the respective amino acid sequences of which are as follows:

(SEQ ID NO: 131)
AE48:
MAEPAGSPTSTEEGTPGSGTASSSPGSSTPSGATGSPGASPGTSSTGS
(SEQ ID NO: 132)
AM48:
MAEPAGSPTSTEEGASPGTSSTGSPGSSTPSGATGSPGSSTPSGATGS

[0179] In another embodiment, the short-length N-terminal XTEN is linked to an XTEN of longer length to form the N-terminal region of the BFXTEN fusion protein, wherein the polynucleotide sequence encoding the short-length N-terminal XTEN confers the property of enhanced expression in the host cell, and wherein the long length of the expressed XTEN contributes to the enhanced properties of the XTEN carrier in the fusion protein, as described above. In the foregoing, the short-length XTEN is linked to any of the XTEN disclosed herein (e.g., an XTEN of Table 4) and the resulting XTEN, in turn, is linked to the N-terminal of any of the BP disclosed herein (e.g., a BP of Table 1 or a sequence variant or fragment thereof) as a component of the fusion protein. Alternatively, polynucleotides encoding the short-length XTEN (or its complement) is linked to polynucleotides encoding any of the XTEN (or its complement) disclosed herein and the resulting gene encoding the N-terminal XTEN, in turn, is linked to the 5′ end of polynucleotides encoding any of the BP (or to the 3′ end of its complement) disclosed herein. In some embodiments, the N-terminal XTEN polypeptide with long length exhibits at least about 80%, or at least about 90%, or at least about 91%, or at least about 92%, or at least about 93%, or at least about 94%, or at least about 95%, or at least about 96%, or at least about 97%, or at least about 98%, or at least 99%, or exhibits 100% sequence identity compared to an amino acid sequence selected from the group consisting of the sequences AE624, AE912, and AM923.

[0180] In any of the foregoing N-terminal XTEN embodiments described above, the N-terminal XTEN can have from about one to about six additional amino acid residues, preferably selected from GESTPA, to accommodate the endonuclease restriction sites that is employed to join the nucleotides encoding the N-terminal XTEN to the gene encoding the targeting moiety of the fusion protein. Non-limiting examples of amino acids compatible with the restrictions sites and the preferred amino acids are listed in Table 5, below. The methods for the generation of the N-terminal sequences and incorporation into the fusion proteins of the invention are described more fully in the Examples.

[0181] 5. Net Charge

[0182] In other embodiments, the XTEN polypeptides have an unstructured characteristic imparted by incorporation of amino acid residues with a net charge and containing a low proportion or no hydrophobic amino acids in the XTEN sequence. The overall net charge and net charge density is controlled by modifying the content of charged amino acids in the XTEN sequences, either positive or negative, with the net charge typically represented as the percentage of amino acids in the polypeptide contributing to a charged state beyond those residues that are cancelled by a residue with an opposing charge. In some embodiments, the net charge density of the XTEN of the compositions may be above +0.1 or below −0.1 charges/residue. By “net charge density” of a protein or peptide herein is meant the net charge divided by the total number of amino acids in the protein or propeptide. In other embodiments, the net charge of an XTEN can be about 0%, about 1%, about 2%, about 3%, about 4%, about 5%, about 6%, about 7%, about 8%, about 9%, about 10% about 11%, about 12%, about 13%, about 14%, about 15%, about 16%, about 17%, about 18%, about 19%, or about 20% or more. In some embodiments, the XTEN sequence comprises charged residues separated by other residues such as serine or glycine, which leads to better expression or purification behavior. Based on the net charge, some XTENs have an isoelectric point (pI) of 1.0, 1.5, 2.0, 2.5, 3.0, 3.5, 4.0, 4.5, 5.0, 5.5, 6.0, or even 6.5. In preferred embodiments, the XTEN will have an isoelectric point between 1.5 and 4.5 and carry a net negative charge under physiologic conditions.

[0183] Not to be bound by a particular theory, it is believed that the XTEN can adopt open conformations due to electrostatic repulsion between individual amino acids of the XTEN polypeptide that individually carry a net negative charge and that are distributed across the sequence of the XTEN polypeptide. Such a distribution of net negative charge in the extended sequence lengths of XTEN can lead to an unstructured conformation that, in turn, can result in an effective increase in hydrodynamic radius. Since most tissues and surfaces in a human or animal have a net negative charge, in some embodiments, the XTEN sequences are designed to have a net negative charge to minimize non-specific interactions between the XTEN containing compositions and various surfaces such as blood vessels, healthy tissues, or various receptors, which would further contribute to reduced active clearance of the fusion protein comprising XTEN with a net negative charge.

[0184] In preferred embodiments, the negative charge of the subject XTEN is conferred by incorporation of glutamic acid residues. For example, where an XTEN with a negative charge is desired, the XTEN can be selected solely from an AE family sequence, which has approximately a 17% net charge due to incorporated glutamic acid, or can include varying proportions of glutamic acid-containing motifs of Table 3 to provide the desired degree of net charge. Non-limiting examples of AE XTEN include, but are not limited to the AE36, AE42, AE48, AE144, AE288, AE576, AE624, AE864, and AE912 polypeptide sequences of Tables 4 and 10, or fragments thereof. In one embodiment, an XTEN sequence of Tables 4 or 9-13 can be modified to include additional glutamic acid residues to achieve the desired net negative charge. Accordingly, in one embodiment the invention provides XTEN in which the XTEN sequences contain about 1%, 2%, 4%, 8%, 10%, 15%, 17%, 20%, 25%, or even about 30% glutamic acid. Generally, the glutamic residues are spaced uniformly across the XTEN sequence. In some cases, the XTEN can contain about 10-80, or about 15-60, or about 20-50 glutamic residues per 20 kDa of XTEN that can result in an XTEN with charged residues that would have very similar pKa, which can increase the charge homogeneity of the product and sharpen its isoelectric point, enhance the physicochemical properties of the resulting BFXTEN fusion protein for, and hence, simplifying purification procedures. In one embodiment, the invention contemplates incorporation of aspartic acid residues into XTEN in addition to glutamic acid in order to achieve a net negative charge.

[0185] In other embodiments, where no net charge is desired, the XTEN can be selected from, for example, AG XTEN components, such as the AG motifs of Table 3, or those AM motifs of Table 3 that have no net charge. Non-limiting examples of AG XTEN include, but are not limited to AG42, AG144, AG288, AG576, and AG864 polypeptide sequences of Tables 4 and 11, or fragments thereof. In another embodiment, the XTEN can comprise varying proportions of AE and AG motifs in order to have a net charge that is deemed optimal for a given use or to maintain a given physicochemical property.

[0186] The XTEN of the compositions of the present invention generally have no or a low content of positively charged amino acids. In some embodiments, the XTEN may have less than about 10% amino acid residues with a positive charge, or less than about 7%, or less than about 5%, or less than about 2%, or less than about 1% amino acid residues with a positive charge. However, the invention contemplates constructs where a limited number of amino acids with a positive charge, such as lysine, are incorporated into XTEN to permit conjugation between the epsilon amine of the lysine and a reactive group on a peptide, a linker bridge, or a reactive group on a drug or small molecule to be conjugated to the XTEN backbone. In one embodiment of the foregoing, the XTEN has between about 1 to about 100 lysine residues, or about 1 to about 70 lysine residues, or about 1 to about 50 lysine residues, or about 1 to about 30 lysine residues, or about 1 to about 20 lysine residues, or about 1 to about 10 lysine residues, or about 1 to about 5 lysine residues, or alternatively only a single lysine residue. Using the foregoing lysine-containing XTEN, fusion proteins are constructed that comprises XTEN, a BP, plus a chemotherapeutic agent useful in the treatment of growth-related diseases or disorders linked to the lysine, wherein the maximum number of molecules of the agent incorporated into the XTEN component is determined by the numbers of lysines or other amino acids with reactive side chains (e.g., cysteine) incorporated into the XTEN.

[0187] As hydrophobic amino acids can impart structure to a polypeptide, the invention provides that the content of hydrophobic amino acids in the XTEN will typically be less than 5%, or less than 2%, or less than 1% hydrophobic amino acid content. In one embodiment, the amino acid content of methionine and tryptophan in the XTEN component of a BFXTEN fusion protein is less than 5%, or less than 2%, and most preferably less than 1%. In another embodiment, the XTEN will have a sequence that has less than 10% amino acid residues with a positive charge, the sum of methionine and tryptophan residues will be less than 2%, and the sum of asparagine and glutamine residues will be less than 10% of the total XTEN sequence.

[0188] 6. Low Immunogenicity

[0189] In another aspect, the invention provides BFXTEN in which the XTEN sequences have a low degree of immunogenicity or are substantially non-immunogenic. Several factors can contribute to the low immunogenicity of XTEN, including but not limited to the non-repetitive sequence, the unstructured conformation, the high degree of solubility, the low degree or lack of self-aggregation, the low degree or lack of proteolytic sites within the sequence, and the low degree or lack of epitopes in the XTEN sequence.

[0190] Conformational epitopes are formed by regions of the protein surface that are composed of multiple discontinuous amino acid sequences of the protein antigen. The precise folding of the protein brings these sequences into a well-defined, stable spatial configurations, or epitopes, that can be recognized as “foreign” by the host humoral immune system, resulting in the production of antibodies to the protein or triggering a cell-mediated immune response. In the latter case, the immune response to a protein in an individual is heavily influenced by T-cell epitope recognition that is a function of the peptide binding specificity of that individual's HLA-DR allotype. Engagement of a MHC Class II peptide complex by a cognate T-cell receptor on the surface of the T-cell, together with the cross-binding of certain other co-receptors such as the CD4 molecule, can induce an activated state within the T-cell. Activation leads to the release of cytokines further activating other lymphocytes such as B cells to produce antibodies or activating T killer cells as a full cellular immune response.

[0191] The ability of a peptide to bind a given MHC Class II molecule for presentation on the surface of an APC (antigen presenting cell) is dependent on a number of factors; most notably its primary sequence. In one embodiment, a lower degree of immunogenicity may be achieved by designing XTEN sequences that resist antigen processing in antigen presenting cells, and/or choosing sequences that do not bind MHC receptors well. The invention provides BFXTEN with substantially non-repetitive XTEN polypeptides designed to reduce binding with MHC II receptors, as well as avoiding formation of epitopes for T-cell receptor or antibody binding, resulting in a low degree of immunogenicity. Avoidance of immunogenicity is, in part, a direct result of the conformational flexibility of XTEN sequences; i.e., the lack of secondary structure due to the selection and order of amino acid residues. For example, of particular interest are sequences having a low tendency to adapt compactly folded conformations in aqueous solution or under physiologic conditions that could result in conformational epitopes. The administration of fusion proteins comprising XTEN, using conventional therapeutic practices and dosing, would generally not result in the formation of neutralizing antibodies to the XTEN sequence, and may also reduce the immunogenicity of the BP fusion partner in the BFXTEN compositions.

[0192] In one embodiment, the XTEN sequences utilized in the subject fusion proteins can be substantially free of epitopes recognized by human T cells. The elimination of such epitopes for the purpose of generating less immunogenic proteins has been disclosed previously; see for example WO 98/52976, WO 02/079232, and WO 00/3317 which are incorporated by reference herein. Assays for human T cell epitopes have been described (Stickler, M., et al. (2003) J Immunol Methods, 281: 95-108). Of particular interest are peptide sequences that can be oligomerized without generating T cell epitopes or non-human sequences. This is achieved by testing direct repeats of these sequences for the presence of T-cell epitopes and for the occurrence of 6 to 15-mer and, in particular, 9-mer sequences that are not human, and then altering the design of the XTEN sequence to eliminate or disrupt the epitope sequence. In some embodiments, the XTEN sequences are substantially non-immunogenic by the restriction of the numbers of epitopes of the XTEN predicted to bind MHC receptors. With a reduction in the numbers of epitopes capable of binding to MHC receptors, there is a concomitant reduction in the potential for T cell activation as well as T cell helper function, reduced B cell activation or upregulation and reduced antibody production. The low degree of predicted T-cell epitopes can be determined by epitope prediction algorithms such as, e.g., TEPITOPE (Sturniolo, T., et al. (1999) Nat Biotechnol, 17: 555-61), as shown in Example 36. The TEPITOPE score of a given peptide frame within a protein is the log of the K_{d} (dissociation constant, affinity, off-rate) of the binding of that peptide frame to multiple of the most common human MHC alleles, as disclosed in Sturniolo, T. et al. (1999) Nature Biotechnology 17:555). The score ranges over at least 20 logs, from about 10 to about −10 (corresponding to binding constraints of 10e¹⁰ K_{d} to 10e⁻¹⁰ K_{d}), and can be reduced by avoiding hydrophobic amino acids that serve as anchor residues during peptide display on MHC, such as M, I, L, V, F. In some embodiments, an XTEN component incorporated into a BFXTEN does not have a predicted T-cell epitope at a TEPITOPE threshold score of about −5, or −6, or −7, or −8, or −9, or at a TEPITOPE score of −10. As used herein, a score of “−9” would be a more stringent TEPITOPE threshold than a score of −5.

[0193] In another embodiment, the XTEN sequence of the subject BFXTEN fusion proteins can be rendered substantially non-immunogenic by the restriction of known proteolytic sites from the sequence of the XTEN, reducing the processing of XTEN into small peptides that can bind to MHC II receptors. In another embodiment, the XTEN sequence can be rendered substantially non-immunogenic by the use a sequence that is substantially devoid of secondary structure, conferring resistance to many proteases due to the high entropy of the structure. Accordingly, the reduced TEPITOPE score and elimination of known proteolytic sites from the XTEN may render the XTEN of the BFXTEN fusion proteins substantially unable to be bound by mammalian receptors, including those of the immune system. In one embodiment, an XTEN of a BFXTEN fusion protein can have >100 nM K_{d} binding to a mammalian receptor, or greater than 500 nM K_{d}, or greater than 1 μM K_{d} towards a mammalian cell surface or circulating polypeptide receptor.

[0194] Additionally, the non-repetitive sequence and corresponding lack of epitopes of XTEN can limit the ability of B cells to bind to or be activated by XTEN. A repetitive sequence is recognized and can form multivalent contacts with even a few B cells and, as a consequence of the cross-linking of multiple T-cell independent receptors, can stimulate B cell proliferation and antibody production. In contrast, while a XTEN can make contacts with many different B cells over its extended sequence, each individual B cell may only make one or a small number of contacts with an individual XTEN due to the lack of repetitiveness of the sequence. As a result, XTENs typically may have a much lower tendency to stimulate proliferation of B cells and thus an immune response. In one embodiment, the BFXTEN may have reduced immunogenicity as compared to the corresponding BP that is not fused. In one embodiment, the administration of up to three parenteral doses of a BFXTEN to a mammal may result in detectable anti-BFXTEN IgG at a serum dilution of 1:100 but not at a dilution of 1:1000. In another embodiment, the administration of up to three parenteral doses of an BFXTEN to a mammal may result in detectable anti-BP IgG at a serum dilution of 1:100 but not at a dilution of 1:1000. In another embodiment, the administration of up to three parenteral doses of an BFXTEN to a mammal may result in detectable anti-XTEN IgG at a serum dilution of 1:100 but not at a dilution of 1:1000. In the foregoing embodiments, the mammal can be a mouse, a rat, a rabbit, or a cynomolgus monkey.

[0195] An additional feature of XTENs with non-repetitive sequences relative to sequences with a high degree of repetitiveness can be that non-repetitive XTENs form weaker contacts with antibodies. Antibodies are multivalent molecules. For instance, IgGs have two identical binding sites and IgMs contain 10 identical binding sites. Thus antibodies against repetitive sequences can form multivalent contacts with such repetitive sequences with high avidity, which can affect the potency and/or elimination of such repetitive sequences. In contrast, antibodies against non-repetitive XTENs may yield monovalent interactions, resulting in less likelihood of immune clearance such that the BFXTEN compositions can remain in circulation for an increased period of time.

[0196] 7. Increased Hydrodynamic Radius

[0197] In another aspect, the present invention provides BFXTEN in which the XTEN sequences can have a high hydrodynamic radius that confers a corresponding increased apparent molecular weight to the BFXTEN fusion protein. As detailed in Example 19, the linking of XTEN to BP sequences can result in BFXTEN compositions that can have increased hydrodynamic radii, increased apparent molecular weight, and increased apparent molecular weight factor compared to a BP not linked to an XTEN. For example, in therapeutic applications in which prolonged half-life is desired, compositions in which a XTEN with a high hydrodynamic radius is incorporated into a fusion protein comprising one or more BP can effectively enlarge the hydrodynamic radius of the composition beyond the glomerular pore size of approximately 3-5 nm (corresponding to an apparent molecular weight of about 70 kDA) (Caliceti. 2003. Pharmacokinetic and biodistribution properties of poly(ethylene glycol)-protein conjugates. Adv Drug Deliv Rev 55:1261-1277), resulting in reduced renal clearance of circulating proteins. The hydrodynamic radius of a protein is determined by its molecular weight as well as by its structure, including shape and compactness. Not to be bound by a particular theory, the XTEN can adopt open conformations due to electrostatic repulsion between individual charges of the peptide or the inherent flexibility imparted by the particular amino acids in the sequence that lack potential to confer secondary structure. The open, extended and unstructured conformation of the XTEN polypeptide can have a greater proportional hydrodynamic radius compared to polypeptides of a comparable sequence length and/or molecular weight that have secondary and/or tertiary structure, such as typical globular proteins. Methods for determining the hydrodynamic radius are well known in the art, such as by the use of size exclusion chromatography (SEC), as described in U.S. Pat. Nos. 6,406,632 and 7,294,513. As the results of Example 19 demonstrate, the addition of increasing lengths of XTEN results in proportional increases in the parameters of hydrodynamic radius, apparent molecular weight, and apparent molecular weight factor, permitting the tailoring of BXTEN to desired characteristic cut-offs. Accordingly, in certain embodiments, the BFXTEN fusion protein can be configured to have a hydrodynamic radius of at least about 5 nm, or at least about 8 nm, or at least about 10 nm, or 12 nm, or at least about 15 nm. In the foregoing embodiments, the large hydrodynamic radius conferred by the XTEN in an BFXTEN fusion protein can lead to reduced renal clearance of the resulting fusion protein, leading to a corresponding increase in terminal half-life, an increase in mean residence time, and/or a decrease in renal clearance rate.

[0198] In another embodiment, the invention provides BFXTEN wherein the length of the XTEN is chosen and selectively linked to a BP to create a fusion protein that has, under physiologic conditions, an apparent molecular weight of at least about 150 kDa, or at least about 300 kDa, or at least about 400 kDa, or at least about 500 kDA, or at least about 600 kDa, or at least about 700 kDA, or at least about 800 kDa, or at least about 900 kDa, or at least about 1000 kDa, or at least about 1200 kDa, or at least about 1500 kDa, or at least about 1800 kDa, or at least about 2000 kDa, or at least about 2300 kDa or more. In another embodiment, an XTEN of a chosen length and is linked to a BP to result in a BFXTEN fusion protein that has, under physiologic conditions, an apparent molecular weight factor of at least three, alternatively of at least four, alternatively of at least five, alternatively of at least six, alternatively of at least eight, alternatively of at least 10, alternatively of at least 15, or an apparent molecular weight factor of at least 20 or greater. In another embodiment, the BFXTEN fusion protein has, under physiologic conditions, an apparent molecular weight factor that is about 4 to about 20, or is about 6 to about 15, or is about 8 to about 12, or is about 9 to about 10.

### III). Bifunctional Fusion Protein Composition Configurations

[0199] The invention provides BFXTEN fusion protein compositions with the BP and XTEN components linked in specific N- to C-terminus configurations. In some embodiments, the composition is a monomeric BMXTEN fusion protein with two different BP linked to one or more XTEN polypeptides. In other embodiments, the bifunctional combination BCXTEN composition can include a first fusion protein comprising a first BP linked to one or more XTEN polypeptides and a second fusion protein comprising a second BP different from the first BP that is linked to one or more XTEN polypeptides. It is specifically intended that BFXTEN encompasses both BMXTEN and BCXTEN forms of the compositions. The invention contemplates BFXTEN comprising, but not limited to BP selected from Table 1 or fragments or sequence variants thereof, and XTEN selected from Tables 4 or 9-12 or sequence variants or fragments thereof. In one embodiment, the BP incorporated into BFXTEN fusion protein each have a sequence that exhibits at least about 80% sequence identity to sequences from Table 1, alternatively at least about 81%, or about 82%, or about 83%, or about 84%, or about 85%, or about 86%, or about 87%, or about 88%, or about 89%, or about 90%, or about 91%, or about 92%, or about 93%, or about 94%, or about 95%, or about 96%, or about 97%, or about 98%, or about 99% sequence identity as compared with sequences from Table 1, and one or more XTEN that each exhibit at least about 80% sequence identity to a sequence from Table 1, alternatively at least about 81%, or about 82%, or about 83%, or about 84%, or about 85%, or about 86%, or about 87%, or about 88%, or about 89%, or about 90%, or about 91%, or about 92%, or about 93%, or about 94%, or about 95%, or about 96%, or about 97%, or about 98%, or about 99% sequence identity as compared with a sequence from Tables 4 or 9-12.

[0200] In one embodiment, the invention provides compositions of two monomeric fusion proteins comprising a first fusion protein comprising a first biologically active protein (BP1) linked to an XTEN and a second fusion protein comprising a second biologically active protein (BP2) different from BP1, each linked to an XTEN that can be identical or can be different. In one embodiment of the bispecifiic combination BFXTEN composition, wherein both BP require a free N-terminus for optimal biological activity, the invention provides compositions of a fusion protein of formula I:

(BP1)-(S)ₓ-(XTEN) I

and a second fusion protein, wherein the fusion protein is of formula II:

(BP2)-(S)_{y}-(XTEN) II

wherein independently for each occurrence, BP1 is a is a biologically active protein (BP) as described hereinabove; BP2 is a is a biologically active protein different from BP1; S is a spacer sequence having between 1 to about 50 amino acid residues that can optionally include a cleavage sequence or amino acids compatible with restriction sites (as described more fully below); x is either 0 or 1; y is either 0 or 1; and XTEN is an extended recombinant polypeptide as described hereinabove.

[0201] In another embodiment of the combination BFXTEN composition, wherein both BP require a free C-terminus for optimal biological activity, the invention provides a fusion protein of formula III:

(XTEN)-(S)ₓ-(BP1) III

and a second fusion protein, wherein the fusion protein is of formula IV:

(XTEN)-(S)_{y}-(BP2) IV

wherein independently for each occurrence, BP1 is a is a biologically active protein (BP) as described hereinabove; BP2 is a is a biologically active protein different from BP1; BP2 is a is a biologically active protein different from BP1; S is a spacer sequence having between 1 to about 50 amino acid residues that can optionally include a cleavage sequence or amino acids compatible with restriction sites (as described more fully below); x is either 0 or 1; y is either 0 or 1; and XTEN is an extended recombinant polypeptide as described hereinabove.

[0202] In another embodiment, the invention provides bispecifiic combination BFXTEN compositions comprising a fusion protein of formula I and formula IV. In another embodiment, the invention provides bispecifiic combination BFXTEN compositions comprising a fusion protein of formula II and formula IIII.

[0203] Thus, the invention encompasses combination BFXTEN comprising two fusion proteins in at least the following permutations of configurations, each listed in an N- to C-terminus orientation: BP1-XTEN+BP2-XTEN; BP1-XTEN+XTEN-BP2; XTEN-BP1+XTEN-BP2; XTEN-BP1+BP2-XTEN; BP1-S-XTEN+BP2-XTEN; BP1-XTEN+BP2-S-XTEN; BP1-S-XTEN+BP2-S-XTEN; BP1-S-XTEN+XTEN-BP2: BP1-XTEN+XTEN-S-BP2: BP1-S-XTEN+XTEN-S-BP2; XTEN-S-BP1+XTEN-BP2; XTEN-BP1+XTEN-S-BP2; XTEN-S-BP1+XTEN-S-BP2; XTEN-S-BP1+BP2-XTEN; XTEN-BP1+BP2-S-XTEN; or XTEN-S-BP1+BP2-S-XTEN.

[0204] In another embodiment, the invention provides an isolated fusion protein, wherein the fusion protein is of formula V:

(XTEN)ᵤ-(S)ᵥ-(BP1)-(S)_{w}-(XTEN)-(S)ₓ-(BP2)-(S)_{y}-(XTEN)_{z} V

wherein independently for each occurrence, BP1 is a is a biologically active protein (BP) as described hereinabove; BP2 is a is a biologically active protein different from BP1; S is a spacer sequence having between 1 to about 50 amino acid residues that can optionally include a cleavage sequence (as described more fully below); u is either 0 or 1; v is either 0 or 1; w is either 0 or 1; x is either 0 or 1; y is either 0 or 1; z is either 0 or 1, with the proviso that u+v+w+x+y+z≧1; and XTEN is an extended recombinant polypeptide as described hereinabove.

[0205] In another embodiment, the invention provides an isolated fusion protein, wherein the fusion protein is of formula VI:

(XTEN)ᵥ-(S)_{w}-(BP1)-(S)ₓ-(BP2)-(S)_{y}-(XTEN)_{z} VI

wherein independently for each occurrence, BP1 is a is a biologically active protein (BP) as described hereinabove; BP2 is a is a biologically active protein different from BP1; S is a spacer sequence having between 1 to about 50 amino acid residues that can optionally include a cleavage sequence (as described more fully below); v is either 0 or 1; w is either 0 or 1; x is either 0 or 1; y is either 0 or 1; z is either 0 or 1, with the proviso that v+w+x+y+z≧1; and XTEN is an extended recombinant polypeptide as described hereinabove.

[0206] The embodiments of formulae I-VI provide configurations wherein the XTEN are optionally linked to BP via spacer sequences that are designed to incorporate or enhance a functionality or property to the composition. For spacers and methods of identifying desirable spacers, see, for example, George, et al. (2003) Protein Engineering 15:871-879, specifically incorporated by reference herein. In one embodiment, the spacer comprises one or more peptide sequences that are between 1-50 amino acid residues in length, or about 1-25 residues, or about 1-10 residues in length. Spacer sequences, exclusive of cleavage sites, can comprise any of the 20 natural L amino acids, and will preferably have XTEN-like properties in that: 1) they comprise hydrophilic amino acids that are sterically unhindered such as, but not limited to, glycine (G), alanine (A), serine (S), threonine (T), glutamate (E), proline (P) and aspartate (D); and 2) they are substantially non-repetitive. In some cases, the spacer can be polyglycines or polyalanines, or is predominately a mixture of combinations of glycine, serine and alanine residues. The spacer polypeptide exclusive of a cleavage sequence is largely to substantially devoid of secondary structure; e.g., less than about 10%, or less than about 5% as determined by the Chou-Fasman and/or GOR algorithms or, in the case of short spacer sequences, would not substantially contribute to the secondary structure of the attached XTEN.

[0207] In one embodiment the spacer comprises amino acids compatible with restrictions sites; e.g., one or two sequences selected from Table 5, to facilitate incorporation of the XTEN encoding sequence into a polynucleotide encoding a BFXTEN construct. For XTEN that are incorporated internal to the BP or BFXTEN sequence, each XTEN would generally be flanked by two spacer sequences comprising amino acids compatible with restriction sites, while XTEN attached to the N- or C-termini would only require a single spacer sequence at the junction of the two components and another at the opposite end for incorporation into the vector. As would be apparent to one of ordinary skill in the art, the spacer sequences comprising amino acids compatible with restriction sites that are internal to BP could be dispensed with when an entire BFXTEN gene is synthetically generated.

TABLE 5
Space Sequences Compatible with
Restriction Sites

| Spacer | Restriction |
|---|---|
| Sequence | Enzyme |
| GSPG | BsaI |
| (SEQ ID NO. 133) | |
| ETET | BsaI |
| (SEQ ID NO: 134) | |
| PGSSS | BbsI |
| (SEQ ID NO: 135) | |
| GAP | AscI |
| GPA | FseI |
| GPSGP | SfiI |
| (SEQ ID NO: 136) | |
| TG | AgeI |
| GT | KpnI |

[0208] In one embodiment, one or more spacer sequences in a BFXTEN fusion protein composition may each further contain a cleavage sequence, which may be identical or may be different, wherein the cleavage sequence may be acted on by a protease appropriate for the cleavage sequence to release the BP from the fusion protein. In some cases, the incorporation of the cleavage sequence into the BFXTEN is designed to permit release of a BP that becomes active or more active upon its release from the XTEN. In one embodiment, the BP that is released from the fusion protein by cleavage of the cleavage sequence exhibits at least about a two-fold, or at least about a three-fold, or at least about a four-fold, or at least about a five-fold, or at least about a six-fold, or at least about a eight-fold, or at least about a ten-fold, or at least about a 20-fold increase in biological activity compared to the intact BFXTEN fusion protein; e.g., binding to a receptor or ligand or an increase or decrease of a biochemical parameter described herein or those known in the art to be associated with metabolic or cardiovascular disorders. The cleavage sequences are located sufficiently close to the BP sequences, generally within 18, or within 12, or within 6, or within 2 amino acids of the BP sequence terminus, such that any remaining residues attached to the BP after cleavage do not appreciably interfere with the activity of the BP, yet provide sufficient access to the protease to be able to effect cleavage of the cleavage sequence. In some embodiments, the cleavage site is a sequence that can be cleaved by a protease endogenous to the mammalian subject such alai the BFXTEN can be cleaved after administration to a subject. In such cases, the BFXTEN can serve as a prodrug or a circulating depot for the BP. Examples of cleavage sequences contemplated by the invention include, but are not limited to, a polypeptide sequence cleavable by a mammalian endogenous protease selected from FXIa, FXIIa, kallikrein, FVIIa, FIXa, FXa, FIIa (thrombin), Elastase-2, granzyme B, MMP-12, MMP-13, MMP-17 or MMP-20, or by non-mammalian proteases such as TEV, enterokinase, PreScission™ protease (rhinovirus 3C protease), and sortase A. Sequences known to be cleaved by the foregoing proteases are known in the art. Exemplary cleavage sequences and cut sites within the sequences are presented in Table 6. For example, thrombin (activated clotting factor II) acts on the sequence LTPR↓SLLV (SEQ ID NO: 144) [Rawlings N. D., et al. (2008) Nucleic Acids Res., 36: D320], which would be cut after the arginine at position 4 in the sequence. Active FIIa is produced by cleavage of FII by FXa in the presence of phospholipids and calcium and is down stream from factor IX in the coagulation pathway. Once activated its natural role in coagulation is to cleave fibrinogen, which then in turn, begins clot formation. FIIa activity is tightly controlled and only occurs when coagulation is necessary for proper hemostasis. However, as coagulation is an on-going process in mammals, by incorporation of the LTPRSLLV (SEQ ID NO: 144) sequence into the BFXTEN between the BP and the XTEN, the XTEN domain would be removed from the adjoining BP concurrent with activation of either the extrinsic or intrinsic coagulation pathways when coagulation is required physiologically, thereby releasing BP over time Similarly, incorporation of other sequences into BFXTEN that are acted upon by endogenous proteases would provide for sustained release of BP that may, in certain cases, provide a higher degree of activity for the BP from the “prodrug” form of the BFXTEN.

[0209] In some cases, only the two or three amino acids flanking both sides of the cut site (four to six amino acids total) would be incorporated into the cleavage sequence. In other cases, the known cleavage sequence can have one or more deletions or insertions or one or two or three amino acid substitutions for any one or two or three amino acids in the known sequence, wherein the deletions, insertions or substitutions result in reduced or enhanced susceptibility but not an absence of susceptibility to the protease, resulting in an ability to tailor the rate of release of the BP from the XTEN. Exemplary substitutions are shown in Table 6.

TABLE 6
Protease Cleavage Sequences

| | Exemplary | | | |
|---|---|---|---|---|
| Protease Acting | Cleavage | SEQ ID | | SEQ ID |
| Upon Sequence | Sequence | NO: | Minimal Cut Site* | NO: |
| FXIa | KLTR↓AET | 137 | KD/FL/T/R↓VA/VE/GT/GV | |
| FXIa | DFTR↓VVG | 138 | KD/FL/T/R↓VA/VE/GT/GV | |
| FXIIa | TMTR↓IVGG | 139 | NA | |
| Kallikrein | SPFR↓STGG | 140 | -/-/FL/RY↓SR/RT/-/- | |
| FVIIa | LQVR↓IVGG | 141 | NA | |
| FIXa | PLGR↓IVGG | 142 | -/-/G/R↓-/-/-/- | |
| FXa | IEGR↓TVGG | 143 | IA/E/GFP/R↓STI/VFS/-/G | |
| FIIa (thrombin) | LTPR↓SLLV | 144 | -/-/PLA/R↓SAG/-/-/- | |
| Elastase-2 | LGPV↓SGVP | 145 | -/-/-/VIAT↓-/-/-/- | |
| Granzyme-B | VAGD↓SLEE | 146 | V/-/-/D↓-/-/-/- | |
| MMP-12 | GPAG↓LGGA | 147 | G/PA/-/G↓L/-/G/- | 148 |
| MMP-13 | GPAG↓LRGA | 149 | G/P/-/G↓L/-/GA/- | 150 |
| MMP-17 | APLG↓LRLR | 151 | -/PS/-/-↓LQ/-/LT/- | |
| MMP-20 | PALP↓LVAQ | 152 | NA | |
| TEV | ENLYFQ↓G | 153 | ENLYFQ↓G/S | 154 |
| Enterokinase | DDDK↓IVGG | 155 | DDDK↓IVGG | 156 |
| Protease 3C | LEVLFQ↓GP | 157 | LEVLFQ↓GP | 158 |
| (PreScission ™) | | | | |
| Sortase A | LPKT↓GSES | 159 | L/P/KEAD/T↓G/-/EKS/S | 160 |

↓indicates cleavage site
NA: not applicable
*the listing of multiple amino acids before, between, or after a slash indicate alternative amino acids that can be substituted at the position; “-” indicates that any amino acid may be substituted for the corresponding amino acid indicated in the middle column

[0210] In some embodiments of the BFXTEN compositions, at least a portion of the biological activity of the respective BP is retained by the intact BFXTEN. In other cases, the BP component either becomes biologically active or has an increase in activity upon its release from the XTEN by cleavage of an optional cleavage sequence(s) incorporated within spacer sequences into the BFXTEN, described above. The BP for inclusion into the subject BFXTEN can be evaluated for activity using assays or measured or determined parameters as described herein (e.g., the assays of the Examples or Table 32), and those sequences that retain at least about 40%, or about 50%, or about 55%, or about 60%, or about 70%, or about 80%, or about 90%, or about 95% or more activity compared to the corresponding native BP sequence would be considered suitable for inclusion in the subject BFXTEN. In one embodiment, a single BP found to retain a suitable level of activity can be linked to one or more XTEN polypeptides having at least about 80% sequence identity to a sequence from Table 4, alternatively at least about 81%, 82%, 83%, 84%, 85%, 86%, 87%, 88%, 89%, 90%, 91%, 92%, 93%, 94%, 95%, 96%, 97%, 98% or 99% sequence identity as compared with a sequence of Table 4, resulting in a chimeric fusion protein. In another embodiment, two BP, different from each other (e.g., BP1 and BP2 as described above) and found to retain suitable levels of activity can be linked to one or more XTEN polypeptides having at least about 80% sequence identity to a sequence from Table 4, alternatively at least about 81%, 82%, 83%, 84%, 85%, 86%, 87%, 88%, 89%, 90%, 91%, 92%, 93%, 94%, 95%, 96%, 97%, 98% or 99% sequence identity as compared with a sequence from Table 4, resulting in a chimeric, monomeric BFXTEN fusion protein.

[0211] Non-limiting examples of sequences of fusion proteins containing a single BP linked to a single XTEN are presented in Table 33. In one embodiment, a combination BFXTEN composition would comprise a first fusion protein having at least about 80% sequence identity to a sequence from Table 33, alternatively at least about 81%, 82%, 83%, 84%, 85%, 86%, 87%, 88%, 89%, 90%, 91%, 92%, 93%, 94%, 95%, 96%, 97%, 98% or 99% sequence identity as compared with a sequence from Table 33, and a second fusion protein with at least about 80% sequence identity to a sequence from Table 33, alternatively at least about 81%, 82%, 83%, 84%, 85%, 86%, 87%, 88%, 89%, 90%, 91%, 92%, 93%, 94%, 95%, 96%, 97%, 98% or 99% sequence identity as compared with a sequence from Table 33, wherein the BP component of the second fusion protein is different from the BP component of the first fusion protein. Non-limiting examples of sequences of monomeric BFXTEN fusion proteins comprising two BP linked to a single XTEN that can be used in the treatment of metabolic and/or cardiovascular diseases, disorders or conditions are presented in Table 34. In one embodiment, a BFXTEN composition would comprise a sequence with at least about 80% sequence identity to a sequence from Table 34, alternatively at least about 81%, 82%, 83%, 84%, 85%, 86%, 87%, 88%, 89%, 90%, 91%, 92%, 93%, 94%, 95%, 96%, 97%, 98% or about 99% sequence identity as compared with a sequence from Table 34. Non-limiting examples of sequences of monomeric BFXTEN fusion proteins containing two BP linked to a single XTEN that can be used in the treatment of cardiovascular diseases, disorders or conditions are presented in Table 35. In one embodiment, a BFXTEN composition would comprise a sequence with at least about 80% sequence identity to a sequence from Table 35, alternatively at least about 81%, 82%, 83%, 84%, 85%, 86%, 87%, 88%, 89%, 90%, 91%, 92%, 93%, 94%, 95%, 96%, 97%, 98% or about 99% sequence identity as compared with a sequence from Table 35. Non-limiting examples of sequences of monomeric BFXTEN fusion proteins containing two BP in which BP1 is linked to the N-terminus of BP2 and BP2 is linked to the N-terminus of an XTEN are presented in Table 36. In one embodiment, a BFXTEN composition would comprise a sequence with at least about 80% sequence identity to a sequence from Table 36, alternatively at least about 81%, 82%, 83%, 84%, 85%, 86%, 87%, 88%, 89%, 90%, 91%, 92%, 93%, 94%, 95%, 96%, 97%, 98% or about 99% sequence identity as compared with a sequence from Table 36. Non-limiting examples of sequences of monomeric BFXTEN fusion proteins containing two BP and two XTEN in an N- to C-terminus configuration of BP1-XTEN1-BP2-XTEN2 are presented in Table 37. In one embodiment, a BFXTEN composition would comprise a sequence with at least about 80% sequence identity to a sequence from Table 37, alternatively at least about 81%, 82%, 83%, 84%, 85%, 86%, 87%, 88%, 89%, 90%, 91%, 92%, 93%, 94%, 95%, 96%, 97%, 98% or about 99% sequence identity as compared with a sequence from Table 37. In the foregoing embodiments of the paragraph, the invention contemplates substitution of a different BP sequence from Table 1 for the sequence of either BP1 or BP2 of any BP sequence of the Tables, and a different XTEN sequence from Table 4 (or a fragment or sequence variant thereof) substituted for either of the XTEN of that sequence. In the foregoing embodiments hereinabove described in this paragraph, the BFXTEN fusion protein can further comprise one or more spacer sequences from Tables 5 and/or 6; the sequences being located between the BP1 and/or BP2 and the XTEN. Non-limiting examples of BFXTEN comprising a BP1, BP2, XTEN, cleavage sequence(s) and spacer amino acids are presented in Table 38.

### IV). Properties of the BFXTEN Compositions of the Invention

[0212] (a) Pharmacokinetic Properties of BFXTEN

[0213] The invention provides BFXTEN fusion protein compositions comprising a first and a second BP linked to XTEN with enhanced pharmacokinetics compared to the first or second BP not linked to XTEN. The pharmacokinetic properties of a BP that can be enhanced by linking a given XTEN to the BP to create a BFXTEN fusion protein (which includes the BMXTEN chimeric bifunctional monomeric XTEN fusion protein compositions with two BP, as well as the BCXTEN chimeric bifunctional combination compositions of two individual fusion proteins, each with a different payload BP linked to one or more XTEN) include, but are not limited to, terminal half-life, area under the curve (AUC), Cmax, volume of distribution, maintaining the biologically active BFXTEN within the therapeutic window above the minimum effective blood concentration for a longer period of time compared to the BP not linked to XTEN, and bioavailability. The half-life and other pharmacokinetic parameters of a BFXTEN can be determined by standard methods involving dosing, the taking of blood samples at times intervals, and the assaying of the protein using ELISA, HPLC, radioassay, or other methods known in the art or as described herein, followed by standard calculations of the data to derive the half-life and other PK parameters. It is intended that “BFXTEN” encompasses both BMXTEN and BCXTEN compositions in the pharmacokinetic embodiments that follow. It is further intended that “BP” encompasses either of the single BP or both, unless indicated otherwise (e.g., BP1 or BP2).

[0214] As a result of the enhanced pharmacokinetic properties conferred by XTEN, the BFXTEN, when used at the dose and dose regimen determined to be appropriate for the composition by the methods described herein, can achieve a circulating concentration resulting in a desired pharmacologic or clinical effect for an extended period of time compared to a comparable dose of the BP not linked to XTEN; properties that permits less frequent dosing or an enhanced pharmacologic effect, resulting in enhanced utility in the treatment of metabolic or cardiovascular disorders, diseases and related conditions. As used herein, a “comparable dose” means a dose with an equivalent moles/kg for the active BP pharmacophore that is administered to a subject in a comparable fashion. It will be understood in the art that a “comparable dosage” of BFXTEN fusion protein would represent a greater weight of agent but would have essentially the same mole-equivalents of BP in the dose of the fusion protein administered.

[0215] When used at the appropriate dose determined for the composition by the methods described herein, the BFXTEN can achieve a circulating concentration resulting in a pharmacologic effect, yet stay within the safety range for either active component of the composition for an extended period of time compared to the BP not linked to XTEN; the BFXTEN remains within the therapeutic window for both the first and second BP components of the fusion protein composition. In some embodiments, a monomeric BFXTEN fusion protein comprising two different BP can result in an additive or synergistic effect when administered to a subject in treatment of the target disease or disorder such that the therapeutic window may be attained at a lower dose compared to an equivalent or comparable dose of one or the other of the BPs not linked to the XTEN.

[0216] As described more fully in the Examples pertaining to pharmacokinetic characteristics of fusion proteins comprising XTEN, it was surprisingly discovered that increasing the length of the XTEN sequence could confer a disproportionate increase in the terminal half-life of a fusion protein comprising the XTEN and a payload portion, such as a BP. Accordingly, the invention provides BFXTEN fusion proteins comprising XTEN wherein the XTEN is selected to provide a targeted half-life for the BFXTEN composition administered to a subject. In some embodiments, the invention provides monomeric BFXTEN fusion proteins comprising XTEN wherein the XTEN is selected to confer an increase in the terminal half-life for the administered BFXTEN, compared to the corresponding BP not linked to XTEN, of at least about 8 h, or at least about 16 h, or at least about 24 h, or at least about 48 h, or at least about 72 h, or at least about 96 h, or at least about 120 h, or at least about 200 h, or at least about 300 h, or at least about 400 h, or an increase in terminal half-life of at least about 500 h. In another embodiment, the invention provides monomeric BFXTEN fusion proteins comprising XTEN wherein the XTEN is selected to confer an increase in the terminal half-life for the administered BFXTEN, compared to the corresponding BP not linked to XTEN and administered at a comparable dose, wherein the increase in terminal half-life is at least about two-fold longer, or at least about three-fold, or at least about four-fold, or at least about five-fold, or at least about six-fold, or at least about seven-fold, or at least about eight-fold, or at least about nine-fold, or at least about ten-fold, or at least about 15-fold, or at least a 20-fold, or at least a 40-fold or greater increase in terminal half-life compared to the BP not linked to XTEN. In another embodiment, administration of a therapeutically effective dose of a BFXTEN fusion protein to a subject in need thereof can result in a gain in time between consecutive doses necessary to maintain a therapeutically effective blood level of the fusion protein of at least 48 h, or at least 72 h, or at least about 96 h, or at least about 120 h, or at least about 7 days, or at least about 14 days, or at least about 21 days between consecutive doses compared to a BP not linked to XTEN and administered at a comparable dose. It will be understood in the art that the time between consecutive doses to maintain a “therapeutically effective blood level” will vary greatly depending on the physiologic state of the subject.

[0217] In one embodiment, the BFXTEN fusion proteins exhibit an increase in AUC of at least about 50%, or at least about 60%, or at least about 70%, or at least about 80%, or at least about 90%, or at least about a 100%, or at least about 150%, or at least about 200%, or at least about 300%, or at least about 500%, or at least about 1000%, or at least about a 2000% compared to the corresponding BP not linked to the XTEN and administered to a subject at a comparable dose. The pharmacokinetic parameters of a BFXTEN can be determined by standard methods involving dosing, the taking of blood samples at times intervals, and the assaying of the protein using ELISA, HPLC, radioassay, or other methods known in the art or as described herein, followed by standard calculations of the data to derive the half-life and other PK parameters.

[0218] The invention further provides combination BXTEN of a first and a second fusion protein in which the first and the second XTEN sequences of the first and the second fusion protein may each be selected to confer substantially the same terminal half-life on the respective fusion proteins of the combination BFXTEN composition when administered to a subject. In one embodiment, the terminal half-life of each fusion protein is within at least about 25% of each other, or more preferably within at least about 20%, or more preferably within at least about 15%, and most preferably within at least about 10%. In the foregoing embodiment, the XTEN of the first and the second fusion protein can have an identical or different sequence, and will each exhibit at least about 80% sequence identity, or at least about 90%, or at least about 95%, or at least about 97% or greater sequence identity to each other or to a sequence selected from Table 4 or a fragment thereof.

[0219] The invention also provides combination BCXTEN compositions comprising a first and a second fusion protein in which the XTEN sequences of the first and the second fusion protein may each be selected to confer a different terminal half-life on the respective fusion proteins of the combination BCXTEN composition. In one embodiment, the XTEN is selected to confer a terminal half-life on the first fusion protein that is at least about 25% longer than the terminal half-life of the second fusion protein, alternatively at least about 50% longer, or at least about 75% longer, or at least about 100% longer, or at least about 150% longer, or at least about 200% longer, or at least about 300% longer, or at least about 400% longer, or at least 500% longer than the terminal half-life of the second fusion protein of the combination BFXTEN composition. In the foregoing embodiment, the XTEN sequence of the first fusion protein of the combination composition is longer than the XTEN sequence of the second fusion protein, and has at least about 72 more amino acids, alternatively at least about 96 more amino acids, alternatively at least about 96 more amino acids, alternatively at least about 120 more amino acids, alternatively at least about 144 more amino acids, alternatively at least about 200 more amino acids, alternatively at least about 250 more amino acids, alternatively at least about 300 more amino acids, alternatively at least about 350 more amino acids, alternatively at least about 400 more amino acids, alternatively at least about 450 more amino acids, alternatively at least about 450 more amino acids, alternatively at least about 500 more amino acids, alternatively at least about 750 more amino acids, or at least about 1000 more amino acids than the XTEN sequence of the second fusion protein. In the embodiments hereinabove described in this paragraph, the XTEN of the first and second fusion proteins of the BCXTEN compositions can each exhibit at least about 90%, or about 91%, or about 92%, or about 93%, or about 94%, or about 95%, or about 96%, or about 97%, or about 98%, or about 99%, to about 100% sequence identity to a first and a second sequence of comparable length selected from Table 4, or a fragment thereof.

[0220] The enhanced PK parameters of the subject BFXTEN compositions allow for reduced amounts of the compositions to be administered to a subject in need thereof, compared to BP not linked to XTEN, particularly for those subjects receiving repeated doses of a biologic for an extended period of time. In one embodiment, about two-fold less, or about three-fold less, or about four-fold less, or about five-fold less, or about six-fold less, or about eight-fold less, or about 10-fold less of moles of the fusion protein is administered to a subject under a dose regimen to maintain a given physiologic effect or biochemical parameter (e.g., glucose homeostasis, change in body weight, maintain cardiac function, etc.), compared to the corresponding BP not linked to the XTEN. In another embodiment, a smaller amount of moles of about two-fold less, or about three-fold less, or about four-fold less, or about five-fold less, or about six-fold less, or about eight-fold less, or about 10-fold less or greater of moles of fusion protein is administered in comparison to the corresponding BP not linked to the XTEN under a dose regimen needed to maintain or achieve a given physiologic effect or biochemical parameter, and the fusion protein achieves a comparable area under the curve as the corresponding equivalent amount of moles of the BP not linked to the XTEN. In another embodiment, the BFXTEN fusion protein requires less frequent administration for routine treatment of a subject with diabetes, insulin resistance, or a cardiovascular disorder, wherein the dose is administered about every four days, about every seven days, about every 10 days, about every 14 days, about every 21 days, or about monthly of the fusion protein administered to a subject, and the fusion protein achieves a comparable area under the curve as the corresponding BP not linked to the XTEN. In another embodiment, an accumulative smaller amount of about 5%, or about 10%, or about 20%, or about 40%, or about 50%, or about 60%, or about 70%, or about 80%, or about 90% less of the moles of fusion protein are administered to a subject in comparison to the corresponding equivalent amount of moles of the BP not linked to the XTEN under a dose regimen needed to maintain or achieve the physiologic effect, yet the fusion protein achieves at least a comparable area under the curve as the corresponding BP not linked to the XTEN. The accumulative smaller amount is measure for a period of at least about one week, or about 14 days, or about 21 days, or about one month.

[0221] (b) Pharmacology and Pharmaceutical Properties of BFXTEN

[0222] The present invention provides BFXTEN compositions comprising BP covalently linked to XTEN that can have enhanced pharmacologic or pharmaceutical properties compared to BP not linked to XTEN, as well as methods to enhance the therapeutic and/or biologic activity or effect of the respective two BP components of the compositions. In addition, the invention provides BFXTEN compositions with enhanced properties compared to those art-known fusion proteins containing immunoglobulin polypeptide partners, polypeptides of shorter length and/or polypeptide partners with repetitive sequences. In addition, BFXTEN fusion proteins provide significant advantages over chemical conjugates, such as pegylated constructs, notably the fact that recombinant BFXTEN fusion proteins can be made in bacterial cell expression systems, which can reduce time and cost at both the research and development and manufacturing stages of a product, as well as result in a more homogeneous, defined product with less toxicity for both the product and metabolites of the BFXTEN compared to pegylated conjugates.

[0223] As therapeutic agents, the BFXTEN may possess a number of advantages over therapeutics not comprising XTEN including, for example, increased solubility, increased thermal stability, reduced immunogenicity, increased apparent molecular weight, reduced renal clearance, reduced proteolysis, reduced metabolism, enhanced therapeutic efficiency, a lower effective therapeutic dose, increased bioavailability, increased time between dosages to maintain blood levels within the therapeutic window for the BP, a “tailored” rate of absorption, enhanced lyophilization stability, enhanced serum/plasma stability, increased terminal half-life, increased solubility in blood stream, decreased binding by neutralizing antibodies, decreased receptor-mediated clearance, reduced side effects, retention of receptor/ligand binding affinity or receptor/ligand activation, stability to degradation, stability to freeze-thaw, stability to proteases, stability to ubiquitination, ease of administration, compatibility with other pharmaceutical excipients or carriers, persistence in the subject, increased stability in storage (e.g., increased shelf-life), reduced toxicity in an organism or environment and the like. The net effect of the enhanced properties is that the BFXTEN may result in enhanced therapeutic and/or pharmacologic effect when administered to a subject with a metabolic and/or cardiovascular disease or disorder.

[0224] In other cases where, for example, the pharmaceutical or physicochemical properties of the first and the second BP are different (such as the degree of aqueous solubility or stability), the length and/or the motif family composition of the first and the second XTEN sequences of the first and the second fusion protein may each be selected to confer a different degree of solubility and/or stability on the respective fusion proteins such that the overall pharmaceutical properties of the two fusion proteins of the combination BFXTEN composition are similar. The respective first and second fusion proteins can be constructed and assayed, using methods described herein, to confirm their physicochemical properties and the XTEN length or family composition adjusted, as needed, to result in the desired properties. In such cases, the combination BFXTEN could be formulated with the first and the second fusion proteins such that the overall composition can have uniform properties. In one embodiment, the XTEN sequence of the respective first and second fusion proteins of the combination BFXTEN are selected such that each fusion protein has a aqueous solubility that is within at least about 25% of the other fusion protein, or at least about 20%, or at least about 15%, or at least about 10%, or at least about 9%, or at least about 8%, or at least about 7%, or at least about 6%, or at least about within 5% of the solubility of the other fusion protein. In the embodiments hereinabove described in this paragraph, the XTEN of the first and second fusion proteins can each exhibit at least about 80%, or about 90%, or about 91%, or about 92%, or about 93%, or about 94%, or about 95%, or about 96%, or about 97%, or about 98%, or about 99%, to about 100% sequence identity to a sequence selected from Table 4, or a fragment thereof. Specific assays and methods for measuring the physical and structural properties of expressed proteins are known in the art, including methods for determining properties such as protein aggregation, solubility, secondary and tertiary structure, melting properties, contamination and water content, etc. Such methods include analytical centrifugation, EPR, HPLC-ion exchange, HPLC-size exclusion, HPLC-reverse phase, light scattering, capillary electrophoresis, circular dichroism, differential scanning calorimetry, fluorescence, HPLC-ion exchange, HPLC-size exclusion, IR, NMR, Raman spectroscopy, refractometry, and UV/Visible spectroscopy. Additional methods are disclosed in Arnau et al., Prot Expr and Purif (2006) 48, 1-13. Application of these methods to the invention would be within the grasp of a person skilled in the art.

[0225] The invention provides BFXTEN compositions that can maintain each BP component within a therapeutic window for a greater period of time compared to comparable dosages of the respective BP not linked to XTEN. It will be understood in the art that a “comparable dosage” of BFXTEN fusion protein would represent a greater weight of agent but would have the same approximate mole-equivalents of BP in the dose of the fusion protein and/or would have the same approximate molar concentration relative to the BP. The invention also provides methods to select the XTEN appropriate for conjugation to provide the desired pharmacokinetic properties that, when matched with the selection of dose, enable enhanced efficacy of the administered composition by maintaining the circulating concentrations of each BP within the therapeutic window for an extended period of time. As used herein, “therapeutic window” means that amount of drug or biologic as a blood or plasma concentration range, that provides efficacy or a desired pharmacologic effect over time for the disease or condition without unacceptable toxicity; the range of the circulating blood concentrations between the minimal amount to achieve a positive therapeutic effect and the maximum amount which results in a response that is the response immediately before toxicity to the subject (at a higher dose or concentration). Additionally, therapeutic window generally encompasses an aspect of time; the blood concentration that results in a desired pharmacologic effect over time that does not result in unacceptable toxicity or adverse events. A dosed composition that stays within the therapeutic window for the subject could also be said to be within the “safety range.”

[0226] Dose optimization is important for many biologics, especially for those with a narrow therapeutic window. For example, many peptides involved in glucose homeostasis have a narrow therapeutic window; e.g., insulin or glucagon. For a BP with a narrow therapeutic window, such as glucagon or a glucagon analog, a standardized single dose for all patients presenting with a variety of symptoms may not always be effective. Since two different biologically active proteins are being used together in the compositions of the present invention, the potency of each of the BPs and the interactive effects achieved by combining and dosing them together is taken into account in order to achieve safe and effective BFXTEN compositions. One such combination is exenatide and glucagon, detailed in Example 25, where two fusion proteins of different length were used together in a model of diabetes to result in multiple beneficial effects without evidence of overt toxicity. A consideration of these factors is well within the purview of the ordinarily skilled clinician or pharmacologist for the purpose of determining the therapeutically or pharmacologically effective amount of the BFXTEN, versus that amount that would result in unacceptable toxicity and place it outside of the safety range.

[0227] In many cases, the therapeutic window for the BP components of the subject compositions have been established and are available in published literature or are stated on the drug label for approved products containing the BP. In other cases, and in particular where two BPs are being used together, the therapeutic window can be established. The methods for establishing the therapeutic window for a given composition are known to those of skill in the art (see, e.g., Goodman & Gilman's The Pharmacological Basis of Therapeutics, 11^{th} Edition, McGraw-Hill (2005)). For example, by using dose-escalation studies in subjects with the target disease or disorder to determine efficacy or a desirable pharmacologic effect, appearance of adverse events, and determination of circulating blood levels, the therapeutic window for a given subject or population of subjects can be determined for a given drug or biologic, or combinations of biologics or drugs. The dose escalation studies can evaluate the activity of a BFXTEN through metabolic studies in a subject or group of subjects that monitor physiological or biochemical parameters, as known in the art or as described herein for one or more parameters associated with the metabolic and/or cardiovascular disease or disorder, or clinical parameters associated with a beneficial outcome for the particular indication, together with observations and/or measured parameters to determine the no effect dose, adverse events, maximum tolerated dose and the like, together with measurement of pharmacokinetic parameters that establish the determined or derived circulating blood levels. The results can then be correlated with the dose administered and the blood concentrations of the therapeutic that are coincident with the foregoing determined parameters or effect levels. By these methods, a range of doses and blood concentrations can be correlated to the minimum effective dose as well as the maximum dose and blood concentration at which a desired effect occurs and above which toxicity occurs, thereby establishing the therapeutic window for the administered BFXTEN. Blood concentrations of the BXTEN fusion protein (or as measured by the BP component) above the maximum would be considered outside the therapeutic window or safety range. Thus, by the foregoing methods, a Cₘᵢₙ blood level would be established, below which the BFXTEN fusion protein would not have the desired pharmacologic effect, and a Cₘₐₓ blood level would be established that would represent the highest circulating concentration before reaching a concentration that would elicit unacceptable side effects, toxicity or adverse events, placing it outside the safety range for the BFXTEN. With such concentrations established, the frequency of dosing and the dosage amount can be further refined by measurement of the Cₘₐₓ and Cₘᵢₙ to provide the appropriate dose amount and dose frequency to keep the fusion protein(s) within the therapeutic window. By the method, one of skill in the art can, by the means disclosed herein or by other methods known in the art, confirm that the administered BFXTEN remains in the therapeutic window for the desired interval or requires adjustment in dose or length or sequence of XTEN. Further, the determination of the appropriate dose and dose frequency to keep the BFXTEN within the therapeutic window establishes the therapeutically effective dose regimen; the schedule for administration of multiple consecutive doses using a therapeutically effective dose regimen of the fusion protein to a subject in need thereof resulting in consecutive Cₘₐₓ peaks and/or Cₘᵢₙ troughs that remain within the therapeutic window and result in an improvement in at least one measured parameter relevant for the metabolic and/or cardiovascular disease, disorder or condition.

[0228] The activity of the BFXTEN compositions of the invention, including functional characteristics or biologic and pharmacologic activity and parameters that result, may be determined by any suitable screening assay known to the art for measuring the desired characteristic. The activity of the BFXTEN polypeptides comprising BP components and their effects on biochemical of physiological parameters may be measured by assays described herein; e.g., one or more assays selected from Table 32, assays of the Examples, or by methods known in the art to ascertain the degree of solubility, structure and retention of biologic activity. Specific in vivo and ex vivo biological assays may also be used to assess the activity of each BFXTEN and/or BP component to be incorporated into BFXTEN. For example, the increase of insulin secretion and/or transcription from the pancreatic beta cells can be measured by methods described in Table 32 or assays known in the art. Glucose uptake by tissues can also be assessed by methods such as the glucose clamp assay and the like. Other in vivo and ex vivo parameters suitable to assess the activity of administered BFXTEN fusion proteins in treatment of metabolic diseases and disorders include fasting glucose level, peak change of postprandial glucose level compared to baseline, glucose homeostasis, response to oral glucose tolerance test, response to insulin challenge, HA_{1c}, level, daily caloric intake, satiety, rate of gastric emptying, pancreatic secretion, insulin secretion in response to glucose challenge, peripheral tissue insulin sensitivity, beta cell mass, beta cell destruction, blood lipid levels or profiles, cholesterol level, body mass index, or body weight reduction.

[0229] For cardiovascular diseases and disorders, a number of markers and/or parameters can be used to assess the biological activity of each BFXTEN and/or the BP component. Such markers parameters include, but are not limited to left ventricular diastolic function, E/A ratio, left ventricular end diastolic pressure, cardiac output, cardiac contractility, left ventricular mass, left ventricular mass to body weight ratio, left ventricular volume, left atrial volume, left ventricular end diastolic dimension (LVEDD), left ventricular end systolic dimension (LVESD), infarct size, exercise capacity, exercise efficiency, and heart chamber size.

[0230] In some cases, the BP component of the BFXTEN fusion proteins of the invention retain at least about 25%, preferably about 30%, 40%, 50%, 60%, 70%, 80%, 90%, 95%, 98%, or 99% percent of the biological activity of a native BP with regard to an in vitro biologic activity or pharmacologic effect known or associated with the use of the native BP in the treatment and prevention of metabolic and/or cardiovascular conditions and disorders. In some cases of the foregoing embodiment, the activity of the BP component may be manifest by the intact BFXTEN fusion protein, while in other cases the activity of the BP component would be primarily manifested upon cleavage and release of the BP from the fusion protein by action of a protease that acts on a cleavage sequence incorporated into the BFXTEN fusion protein.

[0231] Assays can be conducted that allow determination of binding characteristics of the BFXTEN for BP receptors or a ligand, including binding constant (K_{d}), EC₅₀ values, as well as their half-life of dissociation of the ligand-receptor complex (T_{1/2}). Binding affinity can be measured, for example, by a competition-type binding assay that detects changes in the ability to specifically bind to a receptor or ligand. Additionally, techniques such as flow cytometry or surface plasmon resonance can be used to detect binding events. The assays may comprise soluble receptor molecules, or may determine the binding to cell-expressed receptors. Such assays may include cell-based assays, including assays for proliferation, cell death, apoptosis and cell migration. Other assays may determine receptor binding of expressed polypeptides, wherein the assay may comprise soluble receptor molecules, or may determine the binding to cell-expressed receptors. The binding affinity of a BFXTEN for the receptors or ligands specific to the BP can be assayed using binding or competitive binding assays, such as Biacore assays with chip-bound receptors or binding proteins or ELISA assays, as described in U.S. Pat. No. 5,534,617, or other assays known in the art. In addition, BP sequence variants (assayed as single components or as BFXTEN fusion proteins) can be compared to the native BP using a competitive ELISA binding assay to determine whether they have the same binding specificity and affinity as the native BP, or some fraction thereof such that they are suitable for inclusion in BFXTEN. The binding affinity for receptors or ligands of the BFXTEN of the invention can be at least about 10%, or at least about 20%, or at least about 30%, or at least about 40%, or at least about 50%, or at least about 60%, or at least about 70%, or at least about 80%, or at least about 90%, or at least about 95%, or at least about 99% or more of the affinity of a native BP not bound to XTEN. In one embodiment, the binding affinity K_{d} between the subject BFXTEN and a native receptor or ligand of the BFXTEN is at least about 10⁻⁴ M, alternatively at least about 10⁻⁵M, alternatively at least about 10⁻⁶M, or at least about 10⁻⁷M, or at least about 10⁻⁸M, or at least about 10⁻⁹M. In another embodiment, the BFXTEN are designed to reduce the binding affinity of the BP component when linked to the XTEN to, for example, increase the terminal half-life of BFXTEN administered to a subject by reducing receptor-mediated clearance.

[0232] In another embodiment, the invention provides BFXTEN designed to provide reduced binding affinity of a BP component for the receptor or ligand when linked to the XTEN but have a higher degree of affinity restored when the BP is released from XTEN through the cleavage of cleavage sequence(s) incorporated into the BFXTEN sequence, as described more fully above.

[0233] In some cases, the invention provides combination BCXTEN compositions in which the composition can be formulated as a fixed ratio of the two individual fusion proteins, each comprising a different BP. In one embodiment, the fixed ratio of the respective fusion proteins can maintain the individual BP components of the combination within the respective therapeutic windows for each fusion protein for a greater period of time compared to a comparable dose of one or both of the respective BP not linked to XTEN and achieve an enhanced physiologic effect due to a positive interaction of the combination of the two different BP. The use of a fixed ratio is a reflection of differences in the efficacy potency or the potential for eliciting adverse events at a given concentration or dose between the two BPs of the combination BCXTEN composition. For example, therapeutic use of glucagon to overcome hypoglycemia has long been known to result in hyperglycemia episodes (D R Owens, et al., “The metabolic response to glucagon and glucagon-(1-21)-peptide in normal subjects and non insulin dependent diabetics.” Br J Clin Pharmacol. 1986; 22(3): 325-329). To reduce the potential for side effects that would place a BP component outside the therapeutic window, the ratio of the first fusion protein to the second fusion protein in the combination BCXTEN composition can be varied. In some embodiments, the ratio (as moles:moles or molecule:molecule) of the first fusion protein to the second fusion protein in the combination BFXTEN is fixed at 1:1, while in other embodiments the ratio will be about 1:2, or about 1:4, or about 1:8, or about 1:10, or about 1:12, or about 1:15, or about 1:20, or about 1:25, or about 1:30, or about 1:40, or about 1:50, or about 1:75, or about 1:100, or about 1:150, or about 1:200, or about 1:300, or about 1:400, or about 1:500, or about 1:750, or about 1:1000, or about 1:1500 or more; the ratio of the two component fusion proteins of the combination compositions being fixed by and in consideration of the determination of the appropriate dose for the therapeutic window for each individual fusion protein. Once established, the fixed ratio combination BCXTEN composition permits administration of a single composition containing two fusion proteins, each with a different BP, to a subject that may result in safe, additive or synergistic effects against the target disease or disorder such that the therapeutic window may be achieved at a lower dose or with less frequent dosing compared to a comparable dose of one or both of the BPs not linked to the XTEN. Additionally, the fixed ratio combination of the two component BCXTENs can result in enhanced pharmacokinetics such that, when used at an appropriate dose for the composition, circulating concentrations resulting in a pharmacologic effect stay within the safety range for either active component of the composition for an extended period of time compared to the BPs not linked to XTEN; i.e., the BCXTEN remains within the therapeutic window for both the first and second BP components of the fusion protein composition for an extended period of time. In one embodiment, administration administered of an effective dose the BCXTEN to a subject may result in blood concentrations of one or both of the fusion proteins that remain within the therapeutic window at least about 100% longer compared to the corresponding BP not linked to XTEN and administered at a comparable dose; alternatively at least about 200% longer; alternatively at least about 300% longer; alternatively at least about 400% longer; alternatively at least about 500% longer; alternatively at least about 1000% longer; alternatively at least about 1500% longer; or at least about 2000% longer compared to the corresponding BP not linked to XTEN and administered at a comparable dose. As used herein, an “appropriate dose” means a dose of a drug or biologic that, when administered to a subject, would result in a desirable therapeutic or pharmacologic effect and a blood concentration within the therapeutic window.

[0234] Where the toxicological no-effect dose or the blood concentration of a first BP not linked to an XTEN that would elicit an undesirable side effect is considerably lower than that of a second BP (meaning that the native peptide has a higher potency to result in side effects), the invention provides monomeric fusion proteins with two different BP or combinations of fusion proteins, each with a different BP, in which the fusion protein is configured to reduce the biologic potency of the first BP. In some embodiments, the invention provides monomeric BFXTEN fusion proteins comprising two BPs (BP1 and BP2, in which at least the BP1 component requires a free N-terminus for full potency) configured, N- to C-terminus, as BP2-XTEN-BP1, or alternatively BP2-BP1-XTEN, or alternatively BP2-XTEN-BP1-XTEN. In another embodiment, the invention provides a monomeric fusion protein comprising a single BP (wherein the BP component requires a free N-terminus for full potency) configured, N- to C-terminus, as XTEN-BP, in combination with a second monomeric fusion protein with a second different BP linked to an XTEN. The invention takes advantage of the finding that while some biologically active proteins require a free N-terminus in order to remain fully potent, they retain at least a portion of their biologic activity when linked to the C-terminus of another polypeptide, and their incorporation into BFXTEN of the foregoing configurations results in a composition that, when administered to a subject at an appropriate dose, results in efficacy mediated by the BP1 component yet remains within the therapeutic window for that dose. In another embodiment, wherein the BP1 requires a free C-terminus for full potency, the invention provides a monomeric BFXTEN fusion protein configured BP1-XTEN-BP2, or alternatively BP1-BP2-XTEN, or alternatively BP1-XTEN-BP2-XTEN. In another embodiment, wherein a BP requires a free C-terminus for full potency, the invention provides a monomeric BFXTEN fusion protein configured BP-XTEN used in combination with a second fusion protein comprising the second BP. In the foregoing embodiments described in the paragraph, the fusion proteins can optionally further comprise a spacer sequence with a cleavage site. As will be apparent to those of skill in the art, other permutations or multimers of the foregoing BFXTEN are possible to achieve the desired outcome described above and are contemplated by the present invention.

[0235] In another aspect, the invention provides BFXTEN fusion protein compositions configured to increase the terminal half-life of the administered BFXTEN wherein at least a portion of the increased half-life can be due to reduced receptor-mediated clearance (RMC). For many ligands, RMC can occur where activation of the target cell receptor by a bound ligand results in the internalization of the receptor-bound polypeptide ligand with subsequent lysosomal degradation of the ligand. In other cases, where the binding of a polypeptide to its receptor does not lead to activation or where the ligand initiates activation but has an increased off-rate from the receptor, the binding of the polypeptide ligand may not lead to RMC because the ligand-receptor complex is not internalized.

[0236] It is believed that configuring a BFXTEN with at least a first BP component with a substantially reduced binding affinity (expressed as Kd) that retains a degree of, but reduced bioactivity compared to the BP not linked to XTEN, is advantageous in terms of having a composition that displays both a long terminal half-life and retains a sufficient degree of bioactivity. The invention takes advantage of BP ligands wherein reduced binding affinity to a receptor, either as a result of a decreased on-rate or an increased off-rate, may be effected by the obstruction of either the N- or C-terminus, and using that terminus as the linkage to another polypeptide of the composition, whether another BP, an XTEN, or a spacer sequence, as illustrated in FIG. 3. The choice of the particular configuration of the BFXTEN fusion protein can reduce the degree of binding affinity to the receptor such that a reduced rate of receptor-mediated clearance can be achieved. For example, it has been found that while linking of IL-1ra to the N-terminus of an XTEN molecule does not substantially interfere with the binding to its native receptor, the addition of a IL-1ra to the C-terminus of the same XTEN molecule significantly reduced the affinity of the molecule to the receptor, as shown in FIG. 17 and detailed in Example 23. As will be appreciated by those skilled in the art, the ability to reduce binding affinity of the BP to its target receptor may be dependent on the requirement to have a free N- or C-terminus for the particular BP. Thus, depending on the therapeutic goals to be attained by the composition, BFXTEN can be configured with a first BP (BP1) linked to the fusion protein wherein the BP1 retains its binding affinity for a target receptor, and a second BP (BP2) linked to the fusion protein wherein the BP2 has reduced binding affinity for a target receptor compared to the BP2 not linked to the fusion protein. Accordingly, the invention contemplates that BFXTEN are constructed in various configurations, listed in an N- to C-terminus orientation (exclusive of spacer sequences), that can include, but are not limited to BP-XTEN; XTEN-BP; BP1-XTEN-BP2; XTEN1-BP-XTEN2; BP1-BP2-XTEN1; BP2-BP1-XTEN; BP2-XTEN-BP1; BP1-XTEN1-BP2-XTEN2; XTEN1-BP1-XTEN2-BP2 (wherein “1”, “2”, and “3” represent different molecules of the respective BP and XTEN portions of the fusion proteins), the configurations of one of formulae I-VI above, or the configurations of FIG. 1, and are then evaluated for receptor binding affinity, biologic activity, and pharmacokinetic properties in order to select the BFXTEN configuration with the desired characteristics of retained biologic activity, reduced RMC and increased terminal half-life. Exemplary construct sequences of BFXTEN encompassed by the invention can be found, for example, in Tables 34 and 35. Thus, in one embodiment, the invention provides a BFXTEN composition configured such that the binding affinity of the BFXTEN for a target receptor is reduced by at least about 60%, or at least about 70%, or at least about 80%, or at least about 90%, or at least about 95%, or at least about 99%, or at least about 99.99% as compared to the binding affinity of a corresponding BFXTEN in a configuration wherein the binding affinity of the BP component to the target receptor is not reduced or compared to the BP not linked to the fusion protein, determined under comparable conditions. Expressed differently, the BP component of the configured BFXTEN composition has a binding affinity that is about 0.01%, or at least about 0.1%, or at least about 1%, or at least about 2%, or at least about 3%, or at least about 4%, or at least about 5%, or at least about 10%, or at least about 20%, or at least about 30%, or at least 40% that of the corresponding BP component of a BFXTEN in a configuration wherein the binding affinity of the BP component is not reduced. In the foregoing embodiments, the binding affinity of the configured BFXTEN for the target receptor are “substantially reduced” compared to a corresponding native BP or a BFXTEN with a configuration in which the binding affinity of the corresponding BP component is not reduced. Accordingly, the present invention provides compositions and methods to produce compositions with reduced RMC by configuring the BFXTEN so as to be able to bind and activate a sufficient number of receptors to obtain a desired in vivo biological response yet avoid activation of more receptors than is required for obtaining such response. The increased half-life of the configured compositions permits higher dosages and/or reduced frequency of dosing compared to BP not linked to XTEN or compared to BFXTEN configurations and the BP components retain sufficient biological or pharmacological activity to result in a composition with clinical efficacy maintained despite reduced dosing frequency. In cases where a reduction in binding affinity is desired in order to reduce receptor-mediated clearance, it will be clear that sufficient binding affinity to obtain the desired receptor activation must nevertheless be maintained. Accordingly, the present invention provides compositions with reduced RMC by configuring the BFXTEN so as to be able to bind and activate a sufficient number of receptors to obtain a desired in vivo biological response yet avoid activation of more receptors than is required for obtaining such response. In the foregoing embodiments hereinabove described in this paragraph, the subject BFXTEN with a reduced binding affinity for the target receptor can still retain or elicit at least about 5% biological activity, or at least about 10%, or at least about 15%, or at least about 20%, or at least about 30%, or at least about 40%, or at least about 50% of the biological activity compared to at least one of the corresponding BP not linked to XTEN.

[0237] The assays used to assess the activity of the BFXTEN can be those of Table 32, or others known in the art to be useful for assessing the activity or pharmacologic response of a given biological protein. The receptor-polypeptide binding affinity may be determined by any suitable method known in the art, including, for example, a suitably configured Biacore assay described herein. The in vitro RMC may also be determined by a radio-receptor assay wherein the BFXTEN is labeled (e.g. radioactive or fluorescent labeling), cells with the target receptor to the BP component of the BFXTEN are exposed to the labeled BFXTEN, thereby stimulating cells comprising the receptor for the BP, washing the cells, and measuring label activity remaining on the cells. Alternatively, the BFXTEN may be exposed to cells expressing the relevant receptor. After an appropriate incubation time the supernatant is removed and transferred to a well containing similar cells and the biological response of these cells to the supernatant is determined relative to a non-conjugated BP used as a control to determine the extent of the reduced RMC.

[0238] The invention provides that the configuration of the BFXTEN can be designed to tailor the magnitude of the biological activity or the pharmacologic response of a first BP component when the BFXTEN composition is administered to a subject, where the first BP has high potential for unacceptable side effects or toxicity or reduced tolerability of the dose compared to the second BP of the composition. In one embodiment, the invention provides a BFXTEN configured such that the binding affinity of at least one BP component of the BFXTEN for a target receptor is in the range of about 2%, or at least about 3%, or at least about 4%, or at least about 5%, or at least about 10%, or at least about 20%, or at least about 30%, or at least about 40% of that of the corresponding BP component not linked to XTEN. The binding affinity of the configured BXTEN is thus preferably reduced by at least about 60%, or at least about 65%, or at least about 70%, or at least about 75%, or at least about 80%, or at least about 85%, or at least about 90%, or at least about 95%, or at least about 98% as compared to the binding affinity of a corresponding BFXTEN in a configuration wherein the binding affinity of the BP component to the target receptor is not reduced or compared to the BP not linked to the fusion protein, determined under comparable conditions. In the foregoing embodiments hereinabove described in this paragraph, the binding affinity of the configured BFXTEN for the target receptor would be “substantially reduced” compared to a corresponding native BP or a BFXTEN with a configuration in which the binding affinity of the corresponding BP component is not reduced. In one embodiment, the invention provides a BFXTEN in a first configuration comprising at least a first BP linked to the N-terminus of an XTEN wherein the linking results in at least about a two-fold, or at least about a three-fold, or at least about a four-fold, or at least about a five-fold reduction in binding affinity of the BP to the target receptor compared to a BFXTEN in a second configuration in which the first BP is linked to the C-terminus of the XTEN and wherein the half-life of the BFXTEN is increased at least about 50%, or at least about 75%, or at least about 100%, or at least about 150%, or at least about 200%, at least about 300%, at least 400%, or at least 500% compared to the BP component not linked to XTEN. In another embodiment, the invention provides a BFXTEN in a first configuration comprising at least a first BP linked to the C-terminus of an XTEN wherein the linking results in at least about a two-fold, or at least about a three-fold, or at least about a four-fold, or at least about a five-fold reduction in binding affinity of the BP to the target receptor compared to a BFXTEN in a second configuration in which the first BP is linked to the N-terminus of the XTEN, and wherein the half-life of the BFXTEN is increased at least about 50%, or at least about 75%, or at least about 100%, or at least about 150%, or at least about 200%, or at least about 300%, or at least about 400%, or at least about 500% compared to the BP component not linked to XTEN. In the foregoing embodiments hereinabove described in this paragraph, the increased half-life permits higher dosages and reduced frequency of dosing of the BFXTEN compared to BP not linked to XTEN or compared to BFXTEN configurations wherein the BP component retains a binding affinity to the receptor comparable to the native BP.

[0239] In another embodiment, the invention provides a method for increasing the terminal half-life of a BFXTEN by producing a fusion protein construct with a specific N- to C-terminus configuration of the BP and XTEN components. In the method, the half-life of the BFXTEN is increased by designing the configuration to have reduced receptor-mediated clearance (RMC) compared to a BFXTEN in a second, different N- to C-terminus configuration.

[0240] In general, the steps in the design and production of the fusion proteins of the inventive compositions to increase terminal half-life include: (1) the selection of BPs (e.g., native protein sequences of Table 1 of sequence variants or fragments thereof) to treat the particular disease, disorder or condition; (2) selecting the XTEN that will confer the desired PK and physicochemical characteristics on the resulting BFXTEN (e.g., the sequences of Table 4 or sequence variants or fragments thereof); (3) establishing a desired N- to C-terminus configuration of the BFXTEN to achieve the desired efficacy or PK parameters; (4) establishing the design of the expression vector encoding the configured BFXTEN; (5) transforming a suitable host with the expression vector; and (6) expression and recovery of the resultant BFXTEN fusion protein. The method of increasing the terminal half-life provides that the BP and XTEN components can be configured and produced as compositions in an N- to C-terminus orientation (exclusive of spacer sequences), that include, but are not limited to BP-XTEN; XTEN-BP; BP1-XTEN-BP2; XTEN1-BP-XTEN2; BP1-BP2-XTEN1; BP2-BP1-XTEN; BP2-XTEN-BP1; BP1-XTEN1-BP2-XTEN2; XTEN1-BP1-XTEN2-BP2 (wherein “1”, “2”, and “3” represent different molecules of the respective BP and XTEN portions of the fusion proteins), one of the configurations of formulae I-VI above, or the configurations of FIG. 1, and the compositions are subsequently produced and evaluated for receptor binding affinity for the respective BP1 or BP2 components, and those exhibiting reduced binding affinity are evaluated for a concomitant RMC and increased terminal half-life compared to one of the alternative configurations. In some embodiments, the foregoing method provides configured BFXTEN compositions that have an increase in the terminal half-life of at least about 30%, or about 50%, or about 75%, or about 100%, or about 150%, or about 200%, or about 300%, or about 400%, or about 500% or more compared to the half-life of a BFXTEN in a second configuration where receptor binding of at least one BP is not reduced, or compared to the corresponding BP not linked to XTEN, yet still retain at least a portion of the biological activity of the corresponding BP. The method takes advantage of the fact that certain ligands with reduced binding affinity to a receptor, either as a result of a decreased on-rate or an increased off-rate, may be effected by the obstruction of either the N- or C-terminus (as shown in FIG. 3), and using that terminus as the linkage to another polypeptide of the composition, whether another molecule of a BP, an XTEN, or a spacer sequence results in the reduced binding affinity. The choice of the particular configuration of the BFXTEN fusion protein reduces the degree of binding affinity to the receptor such that a reduced rate of receptor-mediated clearance is achieved. Generally, activation of the receptor is coupled to RMC such that binding of a polypeptide to its receptor without activation does not lead to RMC, while activation of the receptor leads to RMC. However, in some cases, particularly where the ligand has an increased off rate, the ligand may nevertheless be able to bind sufficiently to initiate cell signaling without triggering receptor mediated clearance, with the net result that the BFXTEN remains bioavailable. In such cases, the configured BFXTEN has an increased half-life compared to those configurations that lead to a higher degree of RMC.

[0241] Accordingly, in some embodiments, the method provides that the half-life of the BFXTEN can be increased by designing the BFXTEN to have an N- to C-terminus configuration wherein the terminal half-life is increased at least about 50%, or at least about 75%, or at least about 100%, or at least about 150%, or at least about 200%, at least about 300% wherein the BFXTEN has reduced binding affinity of at least one BP component for the target receptor by at least about two-fold, or at least about three-fold, or at least about four-fold, or at least about five-fold compared to a BFXTEN configured wherein the binding affinity of the BP component is not reduced.

### V). Methods of Use: Treatment Applications of BFXTEN and Methods of Enhancing Biologically Active Proteins

[0242] In another aspect, the invention provides a method of for achieving a beneficial effect in a metabolic and/or cardiovascular disease, disorder or condition mediated by BP. The present invention addresses disadvantages and/or limitations of the use of single BP or combinations of BP that have a relatively short terminal half-life and/or a narrow therapeutic window between the minimum effective dose and the maximum tolerated dose.

[0243] In one embodiment, the invention provides a method for achieving a beneficial affect in a subject, such as a human with a metabolic and/or cardiovascular disease, disorder or condition, comprising the step of administering to the subject an effective amount of a BFXTEN wherein the administered BXTEN results in an improvement in at least one physiological parameter or clinical symptom associated with the disease, disorder or condition. The effective amount produces a beneficial effect in helping to treat (e.g., cure or reduce the severity) or prevent (e.g., reduce the likelihood of onset or severity) a disease or disorder in a subject suffering from or at risk of developing a metabolic- or cardiovascular-related disease, disorder or condition, including, but not limited to, one or more selected from Table 7. Other examples of other diseases or clinical disorders that may benefit from treatment with the BFXTEN compositions of the present invention include, but are not limited to, the “honeymoon period” of Type I diabetes, excessive appetite, insufficient satiety, metabolic disorder, glucagonomas, secretory disorders of the airway, arthritis, osteoporosis, central nervous system disease, restenosis, neurodegenerative disease, renal failure, congestive heart failure, cardiac hypertrophy, nephrotic syndrome, cirrhosis, pulmonary edema, hypertension, disorders wherein the reduction of food intake is desired, a disease or disorder of the central nervous system, irritable bowel syndrome, myocardial infarction, cardiac valve disease, stroke, post-surgical catabolic changes, hibernating myocardium or diabetic cardiomyopathy, hypertrophic cardiomyopathy, heart insufficiency, aortic stenosis, valvular regurgitation, intermittent claudication, insufficient urinary sodium excretion, excessive urinary potassium concentration, conditions or disorders associated with toxic hypervolemia, polycystic ovary syndrome, respiratory distress, chronic skin ulcers, nephropathy, and left ventricular systolic dysfunction.

TABLE 7
Metabolic and Cardiovascular Diseases
Metabolic and/or Cardiovascular Diseases
Diabetes
Type 1 diabetes
Type 2 diabetes
Syndrome X
Insulin resistance
Hyperinsulinemia
Atherosclerosis
Cardiovascular disease
Congestive heart failure
Diabetic neuropathy
Dyslipidemia
Eating disorders
Gestational diabetes
Hypercholesterolemia
Hypertension
Insufficient pancreatic beta cell mass
Myocardial ischemia
Myocardial reperfusion
Obesity
Pulmonary hypertension
Retinal neurodegenerative processes
Stroke

[0244] The invention contemplates use of BFXTEN that incorporate specific combinations of BP selected from Table 1 (or sequence variants thereof) that mediate or result in pharmacologic effects that are complementary, additive in effect, or synergistic in effect on one or more of the clinical, biochemical, or physiologic parameters disclosed herein for a metabolic and/or cardiovascular disease or disorder. In the case of glucose or insulin resistance disorders, such parameters include, but are not limited to HbA1c concentrations, insulin concentrations, stimulated C peptide, fasting plasma glucose (FPG), serum cytokine levels, CRP levels, insulin secretion and Insulin-sensitivity index derived from an oral glucose tolerance test (OGTT), body weight, triglyceride levels, cholesterol, body weight, and food consumption.

[0245] In one embodiment, the method comprises administering a therapeutically-effective amount of a pharmaceutical composition comprising a monomeric BFXTEN fusion protein or a combination BFXTEN fusion protein composition comprising a first BP and a second BP selected from Table 1 (or fragments or sequence variants thereof) linked to XTEN sequence(s) and at least one pharmaceutically acceptable carrier to a subject in need thereof that results in greater improvement or a change of greater magnitude in at least one parameter, physiologic condition, or clinical outcome mediated by the first and/or the second BP component(s) compared to the effect mediated by administration of a pharmaceutical composition comprising just one of the BP. In another embodiment, the administration of a BFXTEN may result in improvement of at least one additional bio-activity, that may result from the inclusion of the second component BP or may be a result of an additive or synergistic effect of the combination of the first and the second BPs. In one example of the foregoing embodiments, the method of treatment comprises administration of a BFXTEN comprising BP using a therapeutically effective dose regimen to effect improvements in one or more parameters associated with diabetes or insulin resistance. The improvements may be assessed by a primary efficacy or clinical endpoint, for example an improvement in hemoglobin A1c (HbA1c, see for example Reynolds et al., BMJ, 333(7568):586-589, 2006). Improvements in HbA1c that are indicative of therapeutic efficacy may vary depending on the initial baseline measurement in a patient, with a larger decrease often corresponding to a higher initial baseline and a smaller decrease often corresponding to a lower initial baseline. In one embodiments, the method results in an HbA1c decrease of at least about 0.2%, or alternatively at least about 0.5%, or alternatively at least about 1%, or alternatively at least about 1.5%, or alternatively at least about 2%, or alternatively at least about 2.5%, or alternatively at least about 3%, or alternatively at least about 3.5%, or at least about 4% or more compared with pre-dose levels. In another embodiment, the method of treatment results in reductions in fasting blood sugar (e.g., glucose) levels to <140 mg/dL, alternatively <130 mg/dL, alternatively <125 mg/dL, alternatively <120 mg/dL, alternatively <115 mg/dL, alternatively <110 mg/dL, alternatively <105 mg/dL, or fasting blood sugar levels <100 mg/dL. In other embodiments, the method can result in 120 minute oral glucose tolerance test (OGTT) glucose levels of <200 mg/dL, more preferably <190 mg/dL, more preferably <180 mg/dL, more preferably <170 mg/dL, more preferably <160 mg/dL, more preferably <150 mg/dL, and most preferably <140 mg/dL. In one embodiment, wherein a BFXTEN comprising two BP associated with glucose homeostasis is administered to a subject in need thereof, the administration results in an improvement in fasting blood glucose of <140 mg/dL, alternatively <130 mg/dL, alternatively <125 mg/dL, alternatively <120 mg/dL, alternatively <115 mg/dL, alternatively <110 mg/dL, alternatively <105 mg/dL, or fasting blood sugar levels <100 mg/dL, and further results in an improvement in HbA1c of at least about 0.2%, or at least about 0.5%, or at least about 1%, or at least about 2%, or at least 3%, or at least about 4% or more. In other embodiments of the method, the administration of a BFXTEN may result in improvements of any two parameters selected from insulin concentration, stimulated C peptide, serum cytokine levels, CRP levels, insulin secretion and Insulin-sensitivity index in response to an oral glucose tolerance test (OGTT), body weight, triglyceride levels, cholesterol, body weight, and food consumption. In another embodiment, administration of the BFXTEN to a subject in need thereof can result in an improvement in one or more of the clinical or biochemical or physiologic parameters that is of longer duration or greater magnitude than the that of one of the single BP components not linked to XTEN and administered at a comparable dose, determined using that same assay or based on a measured clinical parameter. Data supporting such beneficial combinations are presented in Example 25 and FIGS. 21-23, where exenatide and glucagon were prepared as two fusion proteins of different length and were used together in a model of diabetes to result in multiple beneficial effects, including reductions in body weight and fasting blood glucose, without evidence of overt toxicity.

[0246] As a result of the enhanced PK of the BFXTEN, as described herein, the method provides that the BFXTEN may be administered using longer intervals between doses compared to the corresponding BP not linked to XTEN to prevent, alleviate, reverse or ameliorate symptoms of the metabolic and/or cardiovascular disease, disorder or condition or prolong the survival of the subject being treated. The method of treatment may include administration of consecutive doses of a therapeutically effective amount of the BFXTEN for a period of time sufficient to achieve and/or maintain the desired physiological parameter or biological effect, and such consecutive doses of a therapeutically effective amount establishes the therapeutically effective dose regimen for the BFXTEN; i.e., the schedule for consecutively administered doses of the fusion protein composition, wherein the doses are given in therapeutically effective amounts to result in a sustained beneficial effect on or improvement in any clinical sign or symptom, aspect, measured physiological parameter or characteristic of a metabolic and/or cardiovascular disease state or condition, including, but not limited to, those described herein. A therapeutically effective amount of the BFXTEN may vary according to factors such as the disease state, age, sex, and weight of the individual, and the ability of the antibody or antibody portion to elicit a desired response in the individual. A therapeutically effective amount is also one in which any toxic or detrimental effects of the BFXTEN are outweighed by the therapeutically beneficial effects. A prophylactically effective amount refers to an amount of BFXTEN required for the period of time necessary to achieve the desired prophylactic result.

[0247] For the methods of treatment, longer acting BFXTEN compositions are preferred, so as to improve patient convenience and to increase the interval between doses and to reduce the amount of drug required to achieve a sustained effect. In one embodiment of the method of treatment, the administration of an effective amount of a BFXTEN to a subject in need thereof results in a gain in time spent within a therapeutic window established for the fusion protein of the composition compared to the corresponding BP component(s) not linked to the fusion protein and administered at a comparable dose to a subject. In the embodiment, the gain in time spent within the therapeutic window is at least about three-fold, or at least about four-fold, or at least about five-fold, or at least about six-fold, or at least about eight-fold, or at least about 10-fold, or at least about 20-fold, or at least about 40-fold compared to the corresponding BP component(s) not linked to the fusion protein and administered at a comparable dose to a subject. In another embodiment, the method of treatment provides that administration of multiple consecutive doses of a BFXTEN administered using a therapeutically effective dose regimen to a subject in need thereof results in a gain in time between consecutive Cₘₐₓ peaks and/or Cₘᵢₙ troughs for blood levels of the fusion protein compared to the corresponding BP(s) not linked to the fusion protein and administered using a dose regimen established for that BP. In the foregoing embodiment, the gain in time spent between consecutive Cₘₐₓ peaks and/or Cₘᵢₙ troughs can be at least about three-fold, or at least about four-fold, or at least about five-fold, or at least about six-fold, or at least about eight-fold, or at least about 10-fold, or at least about 20-fold, or at least about 40-fold compared to the corresponding BP component(s) not linked to the fusion protein and administered using a dose regimen established for that BP. In the embodiments hereinabove described in this paragraph the administration of the fusion protein can result in an improvement in at least one of the parameters disclosed herein as being related to metabolic or cardiovascular diseases using a lower unit dose in moles of fusion protein compared to the corresponding BP component(s) not linked to the fusion protein and administered at a comparable unit dose or dose regimen to a subject.

[0248] In some embodiments of the method of treatment, (i) a smaller molar amount of (e.g. of about two-fold less, or about three-fold less, or about four-fold less, or about five-fold less, or about six-fold less, or about eight-fold less, or about 10-fold-less or greater) the BXTEN fusion protein composition is administered in comparison to the corresponding BPs not linked to the XTEN under an otherwise same dose regimen, and the fusion protein achieves a comparable therapeutic effect as the corresponding BPs not linked to the XTEN; (ii) the fusion protein is administered less frequently (e.g., an increase of at least 2 days, or about 4 days, or about 7 days, or about 10 days, or about 14 days, or about 21 days longer between consecutive doses) in comparison to the corresponding BPs not linked to the XTEN under an otherwise same dose amount, and the fusion protein achieves a comparable therapeutic effect as the corresponding BPs not linked to the XTEN; or (iii) an accumulative smaller molar amount (e.g. about 5%, or about 10%, or about 20%, or about 40%, or about 50%, or about 60%, or about 70%, or about 80%, or about 90% less) of the fusion protein is administered in comparison to the corresponding BPs not linked to the XTEN under the otherwise same dose regimen the fusion protein achieves a comparable therapeutic effect as the corresponding BPs not linked to the XTEN. The accumulative smaller molar amount is measure for a period of at least about one week, or about 14 days, or about 21 days, or about one month. The therapeutic effect can be determined by any of the measured parameters or clinical endpoints described herein.

[0249] The invention further contemplates that BFXTEN used in accordance with the methods provided herein may be administered in conjunction with other treatment methods and pharmaceutical compositions. Such compositions, may include for example, DPP-IV inhibitors, insulin, insulin analogues, PPAR gamma agonists, dual-acting PPAR agonists, GLP-1 agonists or analogues, PTP1B inhibitors, SGLT inhibitors, insulin secretagogues, RXR agonists, glycogen synthase kinase-3 inhibitors, insulin sensitizers, immune modulators, beta-3 adrenergic receptor agonists, Pan-PPAR agonists, 11beta-HSD1 inhibitors, amylin analogues, biguanides, alpha-glucosidase inhibitors, meglitinides, thiazolidinediones, sulfonylureas and other diabetes medicants known in the art.

[0250] The foregoing notwithstanding, in certain embodiments, the BFXTEN used in accordance with the methods of the present invention may prevent or delay the need for additional treatment methods or use of drugs or other pharmaceutical compositions in subjects with metabolic and/or cardiovascular diseases or disorders. In other embodiments, the BFXTEN may reduce the amount, frequency or duration of additional treatment methods or drugs or other pharmaceutical compositions required to treat the underlying metabolic and/or cardiovascular disease, disorder or condition.

[0251] In another aspect, the invention provides a method of designing the bifunctional BXTEN compositions with desired pharmacologic or pharmaceutical properties. The bifunctional BMXTEN and BCXTEN fusion proteins are designed and prepared with various objectives in mind, including improving the therapeutic efficacy over the single bioactive compounds in the treatment of metabolic and/or cardiovascular diseases or disorders, enhancing the pharmacokinetic characteristics of the BP components of one or both of the fusion proteins, lowering the dose of one or both of the BP components required to achieve a pharmacologic effect, and to enhance the ability of the BP components to remain within the therapeutic window for an extended period of time. The design criteria for the fusion proteins may include, but not be limited to: (a) desired in vivo efficacy for a single parameter of the metabolic and/or cardiovascular disease, such as an additive or a synergistic effect that may be achieved with a lower dose or less frequent dosing compared to a use of a single BP; (b) desired in vivo efficacy for two parameters of the therapeutic or prophylactic indication, each mediated by one of the different BPs that collectively result in an enhanced effect; and (c) optional dual action of the paired BPs for multiple therapeutic or prophylactic indications.

[0252] The steps in the design of the fusion proteins and the inventive compositions generally involve: (1) the identification, selection and pairing of BPs (e.g., native proteins, peptide hormones, peptide analogs or derivatives with activity, peptide fragments, such as those of Table 1) to treat the particular metabolic and/or cardiovascular disease, disorder or condition; (2) selecting the XTEN that will confer the desired PK and physicochemical characteristics on the respective BP (e.g., the XTEN of Table 4 or sequence variants or fragments thereof; (3) establishing the optimal N- to C-termini configuration of the BFXTEN to achieve the desired efficacy (e.g., the configurations of formulae I-VI); (4) the covalent linking of BPs either directly or via a spacer to an XTEN selected for its particular pharmaceutical properties; (5) expression and recovery of the resultant fusion protein(s); and in the case of combination BFXTEN comprising two fusion proteins; (6) establishing the fixed ratio of the two fusion proteins in the BFXTEN composition, wherein the administration of the composition to a subject results in the fusion protein(s) being maintained within the therapeutic window for a greater period compared to BPs not linked to XTEN.

[0253] In another aspect, the invention provides methods of making BFXTEN compositions to improve ease of manufacture, result in increased stability, increased water solubility, and/or ease of formulation, as compared to the native BPs. In one embodiment, the invention includes a method of increasing the water solubility of a BP comprising the step of linking the BP to one or more XTEN such that a higher concentration in soluble form of the resulting BFXTEN can be achieved, under physiologic conditions, compared to the BP in an un-fused state. Factors that contribute to the property of XTEN to confer increased water solubility of BPs when incorporated into a fusion protein include the high solubility of the XTEN fusion partner and the low degree of self-aggregation between molecules of XTEN in solution. In some embodiments, the method results in a BFXTEN fusion protein wherein the water solubility is at least about 50%, alternatively 60%, alternatively 70%, alternatively 80%, alternatively 90%, alternatively 100%, alternatively 150%, or at least about 200% greater, or at least about 400% greater, or at least about 600% greater, or at least about 800% greater, or at least about 1000% greater, or at least about 2000% greater, or at least about 4000% greater, or at least about 6000% greater under physiologic conditions, compared to the un-fused BP.

[0254] In another embodiment, the invention includes a method of enhancing the shelf-life of a BP comprising the step of linking the BP with one or more XTEN selected such that the shelf-life of the resulting BFXTEN is extended compared to the BP in an un-fused state. As used herein, shelf-life refers to the period of time over which the functional activity of a BP or BFXTEN that is in solution or in some other storage formulation remains stable without undue loss of activity. As used herein, “functional activity” refers to a pharmacologic effect or biological activity, such as the ability to bind a receptor or ligand, or an enzymatic activity, or to display one or more known functional activities associated with a BP, as known in the art. A BP that degrades or aggregates generally has reduced functional activity or reduced bioavailability compared to one that remains in solution. Factors that contribute to the ability of the method to extend the shelf life of BPs when incorporated into a fusion protein include the increased water solubility, reduced self-aggregation in solution, and increased heat stability of the XTEN fusion partner. In particular, the low tendency of XTEN to aggregate facilitates methods of formulating pharmaceutical preparations containing higher drug concentrations of BPs, and the heat-stability of XTEN contributes to the property of BFXTEN fusion proteins to remain soluble and functionally active for extended periods. In one embodiment, the method results in BFXTEN fusion proteins with “prolonged” or “extended” shelf-life that exhibit greater activity relative to a standard that has been subjected to the same storage and handling conditions. The standard may be the un-fused full-length BP. In one embodiment, the method includes the step of formulating the isolated BFXTEN with one or more pharmaceutically acceptable excipients that enhance the ability of the XTEN to retain its unstructured conformation and for the BFXTEN to remain soluble in the formulation for a time that is greater than that of the corresponding un-fused BP. In one embodiment, the step of linking a BP to an XTEN to create a BFXTEN fusion protein results in a solution that retains greater than about 100% of the functional activity, or greater than about 105%, 110%, 120%, 130%, 150% or 200% of the functional activity of a standard when subjected to the same storage and handling conditions as the standard when compared at a given time point, thereby enhancing its shelf-life.

[0255] Shelf-life may also be assessed in terms of functional activity remaining after storage, normalized to functional activity when storage began. BFXTEN fusion proteins of the invention with prolonged or extended shelf-life as exhibited by prolonged or extended functional activity may retain about 50% more functional activity, or about 60%, 70%, 80%, or 90% more of the functional activity of the equivalent BP not linked to XTEN when subjected to the same conditions for the same period of time. For example, a BFXTEN fusion protein of the invention comprising exendin-4 or glucagon fused to a XTEN sequence may retain about 80% or more of its original activity in solution for periods of up to 5 weeks or more under various temperature conditions. In some embodiments, the BFXTEN retains at least about 50%, or about 60%, or at least about 70%, or at least about 80%, and most preferably at least about 90% or more of its original activity in solution when heated at 80° C. for 10 min In other embodiments, the BFXTEN retains at least about 50%, preferably at least about 60%, or at least about 70%, or at least about 80%, or alternatively at least about 90% or more of its original activity in solution when heated or maintained at 37° C. for about 7 days. In another embodiment, BFXTEN fusion protein retains at least about 80% or more of its functional activity after exposure to a temperature of about 30° C. to about 70° C. over a period of time of about one hour to about 18 hours.

### VI). The DNA Sequences of the Invention

[0256] The present invention provides isolated polynucleic acids encoding BFXTEN chimeric polypeptides and sequences complementary to polynucleic acid molecules encoding BFXTEN chimeric polypeptides, including homologous variants. In another aspect, the invention encompasses methods to produce polynucleic acids encoding BFXTEN chimeric polypeptides and sequences complementary to polynucleic acid molecules encoding BFXTEN chimeric polypeptides, including homologous variants. In general, the methods of producing biologically active BFXTEN comprise providing a polynucleotide sequence coding for a fusion protein comprising BP linked with one or more XTEN tails, and causing the fusion protein to be expressed in a transformed host cell, thereby producing the biologically-active BFXTEN polypeptide. Standard recombinant techniques in molecular biology can be used to make the polynucleotides of the present invention.

[0257] In accordance with the invention, nucleic acid sequences that encode BFXTEN may be used to generate recombinant DNA molecules that direct the expression of BFXTEN fusion proteins in appropriate host cells. Several cloning strategies are envisioned to be suitable for performing the present invention, many of which can be used to generate a construct that comprises a gene coding for a fusion protein of the BFXTEN composition of the present invention, or its complement. In one embodiment, the cloning strategy would be used to create a gene that encodes a monomeric BFXTEN that comprises two BP and at least a first XTEN polypeptide, or its complement. In another embodiment, the cloning strategy would be used to create a first gene that encodes a monomeric BFXTEN that comprises a first BP and at least a first XTEN (or its complement), and a second gene that encodes a monomeric BFXTEN that comprises a second BP and at least a first XTEN (or its complement) that would be used to transform separate host cells for expression of fusion proteins used to formulate a combination BFXTEN composition.

[0258] In designing optimal XTEN sequences, it was discovered that the non-repetitive nature of the XTEN of the inventive compositions can be achieved despite use of a “building block” molecular approach in the creation of the XTEN-encoding sequences. This was achieved by the use of a library of polynucleotides encoding sequence motifs that are then multimerized to create the genes encoding the XTEN sequences (see FIGS. 4 and 5). Thus, while the expressed XTEN may consist of multiple units of as few as four different sequence motifs, because the motifs themselves consist of non-repetitive amino acid sequences, the overall XTEN sequence is rendered non-repetitive. Accordingly, in one embodiment, the XTEN-encoding polynucleotides comprise multiple polynucleotides that encode non-repetitive sequences, or motifs, operably linked in frame and in which the resulting expressed XTEN amino acid sequences are non-repetitive.

[0259] In one approach, a construct is first prepared containing the DNA sequence corresponding to BFXTEN fusion protein. DNA encoding the respective BP of the bifunctional compositions may be obtained from a cDNA library prepared using standard methods from tissue or isolated cells believed to possess BP mRNA and to express it at a detectable level. If necessary, the coding sequence can be obtained using conventional primer extension procedures as described in Sambrook, et al., supra, to detect precursors and processing intermediates of mRNA that may not have been reverse-transcribed into cDNA. Accordingly, DNA can be conveniently obtained from a cDNA library prepared from such sources. The BP encoding gene(s) may also be obtained from a genomic library or created by standard synthetic procedures known in the art (e.g., automated nucleic acid synthesis) using DNA sequences obtained from publicly available databases, patents, or literature references. Such procedures are well known in the art and well described in the scientific and patent literature. For example, sequences can be obtained from Chemical Abstracts Services (CAS) Registry Numbers (published by the American Chemical Society) and/or GenBank Accession Numbers (e.g., Locus ID, NP_XXXXX, and XP_XXXXX) Model Protein identifiers available through the National Center for Biotechnology Information (NCBI) webpage, available on the world wide web at ncbi.nlm.nih.gov that correspond to entries in the CAS Registry or GenBank database that contain an amino acid sequence of the BAP or of a fragment or variant of the BAP. For such sequence identifiers provided herein, the summary pages associated with each of these CAS and GenBank and GenSeq Accession Numbers as well as the cited journal publications (e.g., PubMed ID number (PMID)) are each incorporated by reference in their entireties, particularly with respect to the amino acid sequences described therein. In one embodiment, the BP encoding gene encodes a protein of Table 1, or a fragment or variant thereof.

[0260] A gene or polynucleotide encoding the BP portion of the subject BFXTEN protein, in the case of an expressed fusion protein that will comprise a single BP, and a second gene or polynucleotide encoding a second BP in the case of an expressed monomeric fusion protein that will comprise two BP, can be then be cloned into a construct, which can be a plasmid or other vector under control of appropriate transcription and translation sequences for high level protein expression in a biological system. In a later step, a second gene or polynucleotide coding for the XTEN is genetically fused to the nucleotides encoding the N- and/or C-terminus of the BP gene by cloning it into the construct adjacent and in frame with the gene(s) coding for the BP. This second step can occur through a ligation or multimerization step. In the foregoing embodiments hereinabove described in this paragraph, it is to be understood that the gene constructs that are created can alternatively be the complement of the respective genes that encode the respective fusion proteins.

[0261] The gene encoding for the XTEN can be made in one or more steps, either fully synthetically or by synthesis combined with enzymatic processes, such as restriction enzyme-mediated cloning, PCR and overlap extension. XTEN polypeptides can be constructed such that the XTEN-encoding gene has low repetitiveness while the encoded amino acid sequence has a degree of repetitiveness. Genes encoding XTEN with non-repetitive sequences can be assembled from oligonucleotides using standard techniques of gene synthesis. The gene design can be performed using algorithms that optimize codon usage and amino acid composition. In one method of the invention, a library of relatively short XTEN-encoding polynucleotide constructs is created and then assembled, as illustrated in FIGS. 5 and 6. This can be a pure codon library such that each library member has the same amino acid sequence but many different coding sequences are possible. Such libraries can be assembled from partially randomized oligonucleotides and used to generate large libraries of XTEN segments comprising the sequence motifs. The randomization scheme can be optimized to control amino acid choices for each position as well as codon usage.

[0262] Polynucleotide Libraries

[0263] In another aspect, the invention provides libraries of polynucleotides that encode XTEN sequences that can be used to assemble genes that encode XTEN of a desired length and sequence.

[0264] In certain embodiments, the XTEN-encoding library constructs comprise polynucleotides that encode polypeptide segments of a fixed length. As an initial step, a library of oligonucleotides that encode motifs of 9-14 amino acid residues can be assembled. In a preferred embodiment, libraries of oligonucleotides that encode motifs of 12 amino acids are assembled.

[0265] The XTEN-encoding sequence segments can be dimerized or multimerized into longer encoding sequences. Dimerization or multimerization can be performed by ligation, overlap extension, PCR assembly or similar cloning techniques known in the art. This process of can be repeated multiple times until the resulting XTEN-encoding sequences have reached the organization of sequence and desired length, providing the XTEN-encoding genes. As will be appreciated, a library of polynucleotides that encodes 12 amino acids can be dimerized into a library of polynucleotides that encode 36 amino acids. In turn, the library of polynucleotides that encode 36 amino acids can be serially dimerized into a library containing successively longer lengths of polynucleotides that encode XTEN sequences. In some embodiments, libraries can be assembled of polynucleotides that encode amino acids that are limited to specific sequence XTEN families; e.g., AD, AE, AF, AG, AM, or AQ sequences of Table 3. In other embodiments, libraries can comprises sequences that encode two or more of the motif family sequences from Table 3. Representative polynucleotide sequences of libraries that encode 36mers are presented in Tables 9-12, the design and making of which are described more fully in the Examples. The libraries can be used, in turn, for serial dimerization or ligation to achieve polynucleotide sequence libraries that encode XTEN sequences, for example, of 72, 144, 288, 576, 864, 1296 amino acids, up to a total length of about 3000 amino acids, as well as for the production of intermediate lengths that represent fragments of the XTEN polypeptide sequences of Table 4. In some cases, the polynucleotide library sequences may also include additional bases used as “sequencing islands,” described more fully below.

[0266] FIG. 6 is a schematic flowchart of representative, non-limiting steps in the assembly of a XTEN polynucleotide construct and a BFXTEN polynucleotide construct in the embodiments of the invention. Individual oligonucleotides 501 can be annealed into sequence motifs 502 such as a 12 amino acid motif (“12-mer”), which is subsequently ligated with an oligo containing BbsI, and KpnI restriction sites 503. Additional sequence motifs from a library are annealed to the 12-mer until the desired length of the XTEN gene 504 is achieved. The XTEN gene is cloned into a stuffer vector. The vector encodes a glucagon gene 506 followed by a stuffer sequence that is flanked by BsaI, BbsI, and KpnI sites 507 and a gene encoding exendin-4 508, resulting in the gene encoding a BFXTEN comprising a two BP 500. A non-exhaustive list of polynucleotides encoding XTEN and precursor sequences is provided in Table 8.

TABLE 8
DNA sequences of XTEN and precursor sequences

| XTEN | | SEQ ID |
|---|---|---|
| Name | DNA Sequence | NO: |
| AE144 | GGTAGCGAACCGGCAACTTCCGGCTCTGAAACCCCAGGTACTTCTGAAAGCGCT | 161 |
| | ACTCCTGAGTCTGGCCCAGGTAGCGAACCTGCTACCTCTGGCTCTGAAACCCCA | |
| | GGTAGCCCGGCAGGCTCTCCGACTTCCACCGAGGAAGGTACCTCTACTGAACCT | |
| | TCTGAGGGTAGCGCTCCAGGTAGCGAACCGGCAACCTCTGGCTCTGAAACCCCA | |
| | GGTAGCGAACCTGCTACCTCCGGCTCTGAAACTCCAGGTAGCGAACCGGCTACT | |
| | TCCGGTTCTGAAACTCCAGGTACCTCTACCGAACCTTCCGAAGGCAGCGCACCA | |
| | GGTACTTCTGAAAGCGCAACCCCTGAATCCGGTCCAGGTAGCGAACCGGCTACT | |
| | TCTGGCTCTGAGACTCCAGGTACTTCTACCGAACCGTCCGAAGGTAGCGCACCA | |
| AF144 | GGTACTTCTACTCCGGAAAGCGGTTCCGCATCTCCAGGTACTTCTCCTAGCGGTG | 162 |
| | AATCTTCTACTGCTCCAGGTACCTCTCCTAGCGGCGAATCTTCTACTGCTCCAGG | |
| | TTCTACCAGCTCTACCGCTGAATCTCCTGGCCCAGGTTCTACCAGCGAATCCCCG | |
| | TCTGGCACCGCACCAGGTTCTACTAGCTCTACCGCAGAATCTCCGGGTCCAGGT | |
| | ACTTCCCCTAGCGGTGAATCTTCTACTGCTCCAGGTACCTCTACTCCGGAAAGCG | |
| | GCTCCGCATCTCCAGGTTCTACTAGCTCTACTGCTGAATCTCCTGGTCCAGGTAC | |
| | CTCCCCTAGCGGCGAATCTTCTACTGCTCCAGGTACCTCTCCTAGCGGCGAATCT | |
| | TCTACCGCTCCAGGTACCTCCCCTAGCGGTGAATCTTCTACCGCACCA | |
| AE288 | GGTACCTCTGAAAGCGCAACTCCTGAGTCTGGCCCAGGTAGCGAACCTGCTACC | 163 |
| | TCCGGCTCTGAGACTCCAGGTACCTCTGAAAGCGCAACCCCGGAATCTGGTCCA | |
| | GGTAGCGAACCTGCAACCTCTGGCTCTGAAACCCCAGGTACCTCTGAAAGCGCT | |
| | ACTCCTGAATCTGGCCCAGGTACTTCTACTGAACCGTCCGAGGGCAGCGCACCA | |
| | GGTAGCCCTGCTGGCTCTCCAACCTCCACCGAAGAAGGTACCTCTGAAAGCGCA | |
| | ACCCCTGAATCCGGCCCAGGTAGCGAACCGGCAACCTCCGGTTCTGAAACCCCA | |
| | GGTACTTCTGAAAGCGCTACTCCTGAGTCCGGCCCAGGTAGCCCGGCTGGCTCT | |
| | CCGACTTCCACCGAGGAAGGTAGCCCGGCTGGCTCTCCAACTTCTACTGAAGAA | |
| | GGTACTTCTACCGAACCTTCCGAGGGCAGCGCACCAGGTACTTCTGAAAGCGCT | |
| | ACCCCTGAGTCCGGCCCAGGTACTTCTGAAAGCGCTACTCCTGAATCCGGTCCA | |
| | GGTACTTCTGAAAGCGCTACCCCGGAATCTGGCCCAGGTAGCGAACCGGCTACT | |
| | TCTGGTTCTGAAACCCCAGGTAGCGAACCGGCTACCTCCGGTTCTGAAACTCCA | |
| | GGTAGCCCAGCAGGCTCTCCGACTTCCACTGAGGAAGGTACTTCTACTGAACCT | |
| | TCCGAAGGCAGCGCACCAGGTACCTCTACTGAACCTTCTGAGGGCAGCGCTCCA | |
| | GGTAGCGAACCTGCAACCTCTGGCTCTGAAACCCCAGGTACCTCTGAAAGCGCT | |
| | ACTCCTGAATCTGGCCCAGGTACTTCTACTGAACCGTCCGAGGGCAGCGCACCA | |
| AE576 | GGTAGCCCGGCTGGCTCTCCTACCTCTACTGAGGAAGGTACTTCTGAAAGCGCT | 164 |
| | ACTCCTGAGTCTGGTCCAGGTACCTCTACTGAACCGTCCGAAGGTAGCGCTCCA | |
| | GGTAGCCCAGCAGGCTCTCCGACTTCCACTGAGGAAGGTACTTCTACTGAACCT | |
| | TCCGAAGGCAGCGCACCAGGTACCTCTACTGAACCTTCTGAGGGCAGCGCTCCA | |
| | GGTACTTCTGAAAGCGCTACCCCGGAATCTGGCCCAGGTAGCGAACCGGCTACT | |
| | TCTGGTTCTGAAACCCCAGGTAGCGAACCGGCTACCTCCGGTTCTGAAACTCCA | |
| | GGTAGCCCGGCAGGCTCTCCGACCTCTACTGAGGAAGGTACTTCTGAAAGCGCA | |
| | ACCCCGGAGTCCGGCCCAGGTACCTCTACCGAACCGTCTGAGGGCAGCGCACCA | |
| | GGTACTTCTACCGAACCGTCCGAGGGTAGCGCACCAGGTAGCCCAGCAGGTTCT | |
| | CCTACCTCCACCGAGGAAGGTACTTCTACCGAACCGTCCGAGGGTAGCGCACCA | |
| | GGTACCTCTACTGAACCTTCTGAGGGCAGCGCTCCAGGTACTTCTGAAAGCGCT | |
| | ACCCCGGAGTCCGGTCCAGGTACTTCTACTGAACCGTCCGAAGGTAGCGCACCA | |
| | GGTACTTCTGAAAGCGCAACCCCTGAATCCGGTCCAGGTAGCGAACCGGCTACT | |
| | TCTGGCTCTGAGACTCCAGGTACTTCTACCGAACCGTCCGAAGGTAGCGCACCA | |
| | GGTACTTCTACTGAACCGTCTGAAGGTAGCGCACCAGGTACTTCTGAAAGCGCA | |
| | ACCCCGGAATCCGGCCCAGGTACCTCTGAAAGCGCAACCCCGGAGTCCGGCCC | |
| | AGGTAGCCCTGCTGGCTCTCCAACCTCCACCGAAGAAGGTACCTCTGAAAGCGC | |
| | AACCCCTGAATCCGGCCCAGGTAGCGAACCGGCAACCTCCGGTTCTGAAACCCC | |
| | AGGTACCTCTGAAAGCGCTACTCCGGAGTCTGGCCCAGGTACCTCTACTGAACC | |
| | GTCTGAGGGTAGCGCTCCAGGTACTTCTACTGAACCGTCCGAAGGTAGCGCACC | |
| | AGGTACTTCTACCGAACCGTCCGAAGGCAGCGCTCCAGGTACCTCTACTGAACC | |
| | TTCCGAGGGCAGCGCTCCAGGTACCTCTACCGAACCTTCTGAAGGTAGCGCACC | |
| | AGGTACTTCTACCGAACCGTCCGAGGGTAGCGCACCAGGTAGCCCAGCAGGTTC | |
| | TCCTACCTCCACCGAGGAAGGTACTTCTACCGAACCGTCCGAGGGTAGCGCACC | |
| | AGGTACCTCTGAAAGCGCAACTCCTGAGTCTGGCCCAGGTAGCGAACCTGCTAC | |
| | CTCCGGCTCTGAGACTCCAGGTACCTCTGAAAGCGCAACCCCGGAATCTGGTCC | |
| | AGGTAGCGAACCTGCAACCTCTGGCTCTGAAACCCCAGGTACCTCTGAAAGCGC | |
| | TACTCCTGAATCTGGCCCAGGTACTTCTACTGAACCGTCCGAGGGCAGCGCACC | |
| | AGGTACTTCTGAAAGCGCTACTCCTGAGTCCGGCCCAGGTAGCCCGGCTGGCTC | |
| | TCCGACTTCCACCGAGGAAGGTAGCCCGGCTGGCTCTCCAACTTCTACTGAAGA | |
| | AGGTAGCCCGGCAGGCTCTCCGACCTCTACTGAGGAAGGTACTTCTGAAAGCGC | |
| | AACCCCGGAGTCCGGCCCAGGTACCTCTACCGAACCGTCTGAGGGCAGCGCACC | |
| | A | |
| AF576 | GGTTCTACTAGCTCTACCGCTGAATCTCCTGGCCCAGGTTCCACTAGCTCTACCG | 165 |
| | CAGAATCTCCGGGCCCAGGTTCTACTAGCGAATCCCCTTCTGGTACCGCTCCAG | |
| | GTTCTACTAGCTCTACCGCTGAATCTCCGGGTCCAGGTTCTACCAGCTCTACTGC | |
| | AGAATCTCCTGGCCCAGGTACTTCTACTCCGGAAAGCGGTTCCGCTTCTCCAGGT | |
| | TCTACCAGCGAATCTCCTTCTGGCACCGCTCCAGGTACCTCTCCTAGCGGCGAAT | |
| | CTTCTACCGCTCCAGGTTCTACTAGCGAATCTCCTTCTGGCACTGCACCAGGTTC | |
| | TACCAGCGAATCTCCTTCTGGCACCGCTCCAGGTACCTCTCCTAGCGGCGAATCT | |
| | TCTACCGCTCCAGGTTCTACTAGCGAATCTCCTTCTGGCACTGCACCAGGTTCTA | |
| | CCAGCGAATCTCCTTCTGGCACCGCTCCAGGTACCTCTCCTAGCGGCGAATCTTC | |
| | TACCGCTCCAGGTTCTACTAGCGAATCTCCTTCTGGCACTGCACCAGGTTCTACT | |
| | AGCGAATCTCCTTCTGGCACTGCACCAGGTTCTACCAGCGAATCTCCGTCTGGC | |
| | ACTGCACCAGGTACCTCTACCCCTGAAAGCGGTTCCGCTTCTCCAGGTTCTACTA | |
| | GCGAATCTCCTTCTGGTACCGCTCCAGGTACTTCTACCCCTGAAAGCGGCTCCGC | |
| | TTCTCCAGGTTCCACTAGCTCTACCGCTGAATCTCCGGGTCCAGGTTCTACTAGC | |
| | TCTACTGCAGAATCTCCTGGCCCAGGTACCTCTACTCCGGAAAGCGGCTCTGCA | |
| | TCTCCAGGTACTTCTACCCCTGAAAGCGGTTCTGCATCTCCAGGTTCTACTAGCG | |
| | AATCCCCGTCTGGTACCGCACCAGGTACTTCTACCCCGGAAAGCGGCTCTGCTT | |
| | CTCCAGGTACTTCTACCCCGGAAAGCGGCTCCGCATCTCCAGGTTCTACTAGCG | |
| | AATCTCCTTCTGGTACCGCTCCAGGTTCTACCAGCGAATCCCCGTCTGGTACTGC | |
| | TCCAGGTTCTACCAGCGAATCTCCTTCTGGTACTGCACCAGGTTCTACTAGCTCT | |
| | ACTGCAGAATCTCCTGGCCCAGGTACCTCTACTCCGGAAAGCGGCTCTGCATCT | |
| | CCAGGTACTTCTACCCCTGAAAGCGGTTCTGCATCTCCAGGTTCTACTAGCGAAT | |
| | CTCCTTCTGGCACTGCACCAGGTTCTACCAGCGAATCTCCGTCTGGCACTGCACC | |
| | AGGTACCTCTACCCCTGAAAGCGGTTCCGCTTCTCCAGGTTCTACTAGCGAATCT | |
| | CCTTCTGGCACTGCACCAGGTTCTACCAGCGAATCTCCGTCTGGCACTGCACCA | |
| | GGTACCTCTACCCCTGAAAGCGGTTCCGCTTCTCCAGGTACTTCTCCGAGCGGTG | |
| | AATCTTCTACCGCACCAGGTTCTACTAGCTCTACCGCTGAATCTCCGGGCCCAGG | |
| | TACTTCTCCGAGCGGTGAATCTTCTACTGCTCCAGGTTCCACTAGCTCTACTGCT | |
| | GAATCTCCTGGCCCAGGTACTTCTACTCCGGAAAGCGGTTCCGCTTCTCCAGGTT | |
| | CTACTAGCGAATCTCCGTCTGGCACCGCACCAGGTTCTACTAGCTCTACTGCAG | |
| | AATCTCCTGGCCCAGGTACCTCTACTCCGGAAAGCGGCTCTGCATCTCCAGGTA | |
| | CTTCTACCCCTGAAAGCGGTTCTGCATCTCCA | |
| AM875 | GGTACTTCTACTGAACCGTCTGAAGGCAGCGCACCAGGTAGCGAACCGGCTACT | 166 |
| | TCCGGTTCTGAAACCCCAGGTAGCCCAGCAGGTTCTCCAACTTCTACTGAAGAA | |
| | GGTTCTACCAGCTCTACCGCAGAATCTCCTGGTCCAGGTACCTCTACTCCGGAA | |
| | AGCGGCTCTGCATCTCCAGGTTCTACTAGCGAATCTCCTTCTGGCACTGCACCAG | |
| | GTTCTACTAGCGAATCCCCGTCTGGTACTGCTCCAGGTACTTCTACTCCTGAAAG | |
| | CGGTTCCGCTTCTCCAGGTACCTCTACTCCGGAAAGCGGTTCTGCATCTCCAGGT | |
| | AGCGAACCGGCAACCTCCGGCTCTGAAACCCCAGGTACCTCTGAAAGCGCTACT | |
| | CCTGAATCCGGCCCAGGTAGCCCGGCAGGTTCTCCGACTTCCACTGAGGAAGGT | |
| | ACCTCTACTGAACCTTCTGAGGGCAGCGCTCCAGGTACTTCTGAAAGCGCTACC | |
| | CCGGAGTCCGGTCCAGGTACTTCTACTGAACCGTCCGAAGGTAGCGCACCAGGT | |
| | ACTTCTACCGAACCGTCCGAGGGTAGCGCACCAGGTAGCCCAGCAGGTTCTCCT | |
| | ACCTCCACCGAGGAAGGTACTTCTACCGAACCGTCCGAGGGTAGCGCACCAGGT | |
| | ACTTCTACCGAACCTTCCGAGGGCAGCGCACCAGGTACTTCTGAAAGCGCTACC | |
| | CCTGAGTCCGGCCCAGGTACTTCTGAAAGCGCTACTCCTGAATCCGGTCCAGGT | |
| | ACCTCTACTGAACCTTCCGAAGGCAGCGCTCCAGGTACCTCTACCGAACCGTCC | |
| | GAGGGCAGCGCACCAGGTACTTCTGAAAGCGCAACCCCTGAATCCGGTCCAGGT | |
| | ACTTCTACTGAACCTTCCGAAGGTAGCGCTCCAGGTAGCGAACCTGCTACTTCT | |
| | GGTTCTGAAACCCCAGGTAGCCCGGCTGGCTCTCCGACCTCCACCGAGGAAGGT | |
| | AGCTCTACCCCGTCTGGTGCTACTGGTTCTCCAGGTACTCCGGGCAGCGGTACTG | |
| | CTTCTTCCTCTCCAGGTAGCTCTACCCCTTCTGGTGCTACTGGCTCTCCAGGTAC | |
| | CTCTACCGAACCGTCCGAGGGTAGCGCACCAGGTACCTCTACTGAACCGTCTGA | |
| | GGGTAGCGCTCCAGGTAGCGAACCGGCAACCTCCGGTTCTGAAACTCCAGGTAG | |
| | CCCTGCTGGCTCTCCGACTTCTACTGAGGAAGGTAGCCCGGCTGGTTCTCCGACT | |
| | TCTACTGAGGAAGGTACTTCTACCGAACCTTCCGAAGGTAGCGCTCCAGGTGCA | |
| | AGCGCAAGCGGCGCGCCAAGCACGGGAGGTACTTCTGAAAGCGCTACTCCTGA | |
| | GTCCGGCCCAGGTAGCCCGGCTGGCTCTCCGACTTCCACCGAGGAAGGTAGCCC | |
| | GGCTGGCTCTCCAACTTCTACTGAAGAAGGTTCTACCAGCTCTACCGCTGAATCT | |
| | CCTGGCCCAGGTTCTACTAGCGAATCTCCGTCTGGCACCGCACCAGGTACTTCCC | |
| | CTAGCGGTGAATCTTCTACTGCACCAGGTACCCCTGGCAGCGGTACCGCTTCTTC | |
| | CTCTCCAGGTAGCTCTACCCCGTCTGGTGCTACTGGCTCTCCAGGTTCTAGCCCG | |
| | TCTGCATCTACCGGTACCGGCCCAGGTAGCGAACCGGCAACCTCCGGCTCTGAA | |
| | ACTCCAGGTACTTCTGAAAGCGCTACTCCGGAATCCGGCCCAGGTAGCGAACCG | |
| | GCTACTTCCGGCTCTGAAACCCCAGGTTCCACCAGCTCTACTGCAGAATCTCCG | |
| | GGCCCAGGTTCTACTAGCTCTACTGCAGAATCTCCGGGTCCAGGTACTTCTCCTA | |
| | GCGGCGAATCTTCTACCGCTCCAGGTAGCGAACCGGCAACCTCTGGCTCTGAAA | |
| | CTCCAGGTAGCGAACCTGCAACCTCCGGCTCTGAAACCCCAGGTACTTCTACTG | |
| | AACCTTCTGAGGGCAGCGCACCAGGTTCTACCAGCTCTACCGCAGAATCTCCTG | |
| | GTCCAGGTACCTCTACTCCGGAAAGCGGCTCTGCATCTCCAGGTTCTACTAGCG | |
| | AATCTCCTTCTGGCACTGCACCAGGTACTTCTACCGAACCGTCCGAAGGCAGCG | |
| | CTCCAGGTACCTCTACTGAACCTTCCGAGGGCAGCGCTCCAGGTACCTCTACCG | |
| | AACCTTCTGAAGGTAGCGCACCAGGTAGCTCTACTCCGTCTGGTGCAACCGGCT | |
| | CCCCAGGTTCTAGCCCGTCTGCTTCCACTGGTACTGGCCCAGGTGCTTCCCCGGG | |
| | CACCAGCTCTACTGGTTCTCCAGGTAGCGAACCTGCTACCTCCGGTTCTGAAACC | |
| | CCAGGTACCTCTGAAAGCGCAACTCCGGAGTCTGGTCCAGGTAGCCCTGCAGGT | |
| | TCTCCTACCTCCACTGAGGAAGGTAGCTCTACTCCGTCTGGTGCAACCGGCTCCC | |
| | CAGGTTCTAGCCCGTCTGCTTCCACTGGTACTGGCCCAGGTGCTTCCCCGGGCAC | |
| | CAGCTCTACTGGTTCTCCAGGTACCTCTGAAAGCGCTACTCCGGAGTCTGGCCC | |
| | AGGTACCTCTACTGAACCGTCTGAGGGTAGCGCTCCAGGTACTTCTACTGAACC | |
| | GTCCGAAGGTAGCGCACCA | |
| AE864 | GGTAGCCCGGCTGGCTCTCCTACCTCTACTGAGGAAGGTACTTCTGAAAGCGCT | 167 |
| | ACTCCTGAGTCTGGTCCAGGTACCTCTACTGAACCGTCCGAAGGTAGCGCTCCA | |
| | GGTAGCCCAGCAGGCTCTCCGACTTCCACTGAGGAAGGTACTTCTACTGAACCT | |
| | TCCGAAGGCAGCGCACCAGGTACCTCTACTGAACCTTCTGAGGGCAGCGCTCCA | |
| | GGTACTTCTGAAAGCGCTACCCCGGAATCTGGCCCAGGTAGCGAACCGGCTACT | |
| | TCTGGTTCTGAAACCCCAGGTAGCGAACCGGCTACCTCCGGTTCTGAAACTCCA | |
| | GGTAGCCCGGCAGGCTCTCCGACCTCTACTGAGGAAGGTACTTCTGAAAGCGCA | |
| | ACCCCGGAGTCCGGCCCAGGTACCTCTACCGAACCGTCTGAGGGCAGCGCACCA | |
| | GGTACTTCTACCGAACCGTCCGAGGGTAGCGCACCAGGTAGCCCAGCAGGTTCT | |
| | CCTACCTCCACCGAGGAAGGTACTTCTACCGAACCGTCCGAGGGTAGCGCACCA | |
| | GGTACCTCTACTGAACCTTCTGAGGGCAGCGCTCCAGGTACTTCTGAAAGCGCT | |
| | ACCCCGGAGTCCGGTCCAGGTACTTCTACTGAACCGTCCGAAGGTAGCGCACCA | |
| | GGTACTTCTGAAAGCGCAACCCCTGAATCCGGTCCAGGTAGCGAACCGGCTACT | |
| | TCTGGCTCTGAGACTCCAGGTACTTCTACCGAACCGTCCGAAGGTAGCGCACCA | |
| | GGTACTTCTACTGAACCGTCTGAAGGTAGCGCACCAGGTACTTCTGAAAGCGCA | |
| | ACCCCGGAATCCGGCCCAGGTACCTCTGAAAGCGCAACCCCGGAGTCCGGCCC | |
| | AGGTAGCCCTGCTGGCTCTCCAACCTCCACCGAAGAAGGTACCTCTGAAAGCGC | |
| | AACCCCTGAATCCGGCCCAGGTAGCGAACCGGCAACCTCCGGTTCTGAAACCCC | |
| | AGGTACCTCTGAAAGCGCTACTCCGGAGTCTGGCCCAGGTACCTCTACTGAACC | |
| | GTCTGAGGGTAGCGCTCCAGGTACTTCTACTGAACCGTCCGAAGGTAGCGCACC | |
| | AGGTACTTCTACCGAACCGTCCGAAGGCAGCGCTCCAGGTACCTCTACTGAACC | |
| | TTCCGAGGGCAGCGCTCCAGGTACCTCTACCGAACCTTCTGAAGGTAGCGCACC | |
| | AGGTACTTCTACCGAACCGTCCGAGGGTAGCGCACCAGGTAGCCCAGCAGGTTC | |
| | TCCTACCTCCACCGAGGAAGGTACTTCTACCGAACCGTCCGAGGGTAGCGCACC | |
| | AGGTACCTCTGAAAGCGCAACTCCTGAGTCTGGCCCAGGTAGCGAACCTGCTAC | |
| | CTCCGGCTCTGAGACTCCAGGTACCTCTGAAAGCGCAACCCCGGAATCTGGTCC | |
| | AGGTAGCGAACCTGCAACCTCTGGCTCTGAAACCCCAGGTACCTCTGAAAGCGC | |
| | TACTCCTGAATCTGGCCCAGGTACTTCTACTGAACCGTCCGAGGGCAGCGCACC | |
| | AGGTACTTCTGAAAGCGCTACTCCTGAGTCCGGCCCAGGTAGCCCGGCTGGCTC | |
| | TCCGACTTCCACCGAGGAAGGTAGCCCGGCTGGCTCTCCAACTTCTACTGAAGA | |
| | AGGTAGCCCGGCAGGCTCTCCGACCTCTACTGAGGAAGGTACTTCTGAAAGCGC | |
| | AACCCCGGAGTCCGGCCCAGGTACCTCTACCGAACCGTCTGAGGGCAGCGCACC | |
| | AGGTACCTCTGAAAGCGCAACTCCTGAGTCTGGCCCAGGTAGCGAACCTGCTAC | |
| | CTCCGGCTCTGAGACTCCAGGTACCTCTGAAAGCGCAACCCCGGAATCTGGTCC | |
| | AGGTAGCGAACCTGCAACCTCTGGCTCTGAAACCCCAGGTACCTCTGAAAGCGC | |
| | TACTCCTGAATCTGGCCCAGGTACTTCTACTGAACCGTCCGAGGGCAGCGCACC | |
| | AGGTAGCCCTGCTGGCTCTCCAACCTCCACCGAAGAAGGTACCTCTGAAAGCGC | |
| | AACCCCTGAATCCGGCCCAGGTAGCGAACCGGCAACCTCCGGTTCTGAAACCCC | |
| | AGGTACTTCTGAAAGCGCTACTCCTGAGTCCGGCCCAGGTAGCCCGGCTGGCTC | |
| | TCCGACTTCCACCGAGGAAGGTAGCCCGGCTGGCTCTCCAACTTCTACTGAAGA | |
| | AGGTACTTCTACCGAACCTTCCGAGGGCAGCGCACCAGGTACTTCTGAAAGCGC | |
| | TACCCCTGAGTCCGGCCCAGGTACTTCTGAAAGCGCTACTCCTGAATCCGGTCC | |
| | AGGTACTTCTGAAAGCGCTACCCCGGAATCTGGCCCAGGTAGCGAACCGGCTAC | |
| | TTCTGGTTCTGAAACCCCAGGTAGCGAACCGGCTACCTCCGGTTCTGAAACTCC | |
| | AGGTAGCCCAGCAGGCTCTCCGACTTCCACTGAGGAAGGTACTTCTACTGAACC | |
| | TTCCGAAGGCAGCGCACCAGGTACCTCTACTGAACCTTCTGAGGGCAGCGCTCC | |
| | AGGTAGCGAACCTGCAACCTCTGGCTCTGAAACCCCAGGTACCTCTGAAAGCGC | |
| | TACTCCTGAATCTGGCCCAGGTACTTCTACTGAACCGTCCGAGGGCAGCGCACC | |
| | A | |
| AF864 | GGTTCTACCAGCGAATCTCCTTCTGGCACCGCTCCAGGTACCTCTCCTAGCGGCG | 168 |
| | AATCTTCTACCGCTCCAGGTTCTACTAGCGAATCTCCTTCTGGCACTGCACCAGG | |
| | TTCTACTAGCGAATCCCCGTCTGGTACTGCTCCAGGTACTTCTACTCCTGAAAGC | |
| | GGTTCCGCTTCTCCAGGTACCTCTACTCCGGAAAGCGGTTCTGCATCTCCAGGTT | |
| | CTACCAGCGAATCTCCTTCTGGCACCGCTCCAGGTTCTACTAGCGAATCCCCGTC | |
| | TGGTACCGCACCAGGTACTTCTCCTAGCGGCGAATCTTCTACCGCACCAGGTTCT | |
| | ACTAGCGAATCTCCGTCTGGCACTGCTCCAGGTACTTCTCCTAGCGGTGAATCTT | |
| | CTACCGCTCCAGGTACTTCCCCTAGCGGCGAATCTTCTACCGCTCCAGGTTCTAC | |
| | TAGCTCTACTGCAGAATCTCCGGGCCCAGGTACCTCTCCTAGCGGTGAATCTTCT | |
| | ACCGCTCCAGGTACTTCTCCGAGCGGTGAATCTTCTACCGCTCCAGGTTCTACTA | |
| | GCTCTACTGCAGAATCTCCTGGCCCAGGTACCTCTACTCCGGAAAGCGGCTCTG | |
| | CATCTCCAGGTACTTCTACCCCTGAAAGCGGTTCTGCATCTCCAGGTTCTACTAG | |
| | CGAATCTCCTTCTGGCACTGCACCAGGTTCTACCAGCGAATCTCCGTCTGGCACT | |
| | GCACCAGGTACCTCTACCCCTGAAAGCGGTTCCGCTTCTCCAGGTTCTACCAGCT | |
| | CTACCGCAGAATCTCCTGGTCCAGGTACCTCTACTCCGGAAAGCGGCTCTGCAT | |
| | CTCCAGGTTCTACTAGCGAATCTCCTTCTGGCACTGCACCAGGTACTTCTCCGAG | |
| | CGGTGAATCTTCTACCGCACCAGGTTCTACTAGCTCTACCGCTGAATCTCCGGGC | |
| | CCAGGTACTTCTCCGAGCGGTGAATCTTCTACTGCTCCAGGTACCTCTACTCCTG | |
| | AAAGCGGTTCTGCATCTCCAGGTTCCACTAGCTCTACCGCAGAATCTCCGGGCC | |
| | CAGGTTCTACTAGCTCTACTGCTGAATCTCCTGGCCCAGGTTCTACTAGCTCTAC | |
| | TGCTGAATCTCCGGGTCCAGGTTCTACCAGCTCTACTGCTGAATCTCCTGGTCCA | |
| | GGTACCTCCCCGAGCGGTGAATCTTCTACTGCACCAGGTTCTACTAGCGAATCTC | |
| | CTTCTGGCACTGCACCAGGTTCTACCAGCGAATCTCCGTCTGGCACTGCACCAG | |
| | GTACCTCTACCCCTGAAAGCGGTCCXXXXXXXXXXXXTGCAAGCGCAAGCGGC | |
| | GCGCCAAGCACGGGAXXXXXXXXTAGCGAATCTCCTTCTGGTACCGCTCCAGGT | |
| | TCTACCAGCGAATCCCCGTCTGGTACTGCTCCAGGTTCTACCAGCGAATCTCCTT | |
| | CTGGTACTGCACCAGGTTCTACTAGCGAATCTCCTTCTGGTACCGCTCCAGGTTC | |
| | TACCAGCGAATCCCCGTCTGGTACTGCTCCAGGTTCTACCAGCGAATCTCCTTCT | |
| | GGTACTGCACCAGGTACTTCTACTCCGGAAAGCGGTTCCGCATCTCCAGGTACT | |
| | TCTCCTAGCGGTGAATCTTCTACTGCTCCAGGTACCTCTCCTAGCGGCGAATCTT | |
| | CTACTGCTCCAGGTTCTACCAGCTCTACTGCTGAATCTCCGGGTCCAGGTACTTC | |
| | CCCGAGCGGTGAATCTTCTACTGCACCAGGTACTTCTACTCCGGAAAGCGGTTC | |
| | CGCTTCTCCAGGTTCTACCAGCGAATCTCCTTCTGGCACCGCTCCAGGTTCTACT | |
| | AGCGAATCCCCGTCTGGTACCGCACCAGGTACTTCTCCTAGCGGCGAATCTTCT | |
| | ACCGCACCAGGTTCTACTAGCGAATCCCCGTCTGGTACCGCACCAGGTACTTCT | |
| | ACCCCGGAAAGCGGCTCTGCTTCTCCAGGTACTTCTACCCCGGAAAGCGGCTCC | |
| | GCATCTCCAGGTTCTACTAGCGAATCTCCTTCTGGTACCGCTCCAGGTACTTCTA | |
| | CCCCTGAAAGCGGCTCCGCTTCTCCAGGTTCCACTAGCTCTACCGCTGAATCTCC | |
| | GGGTCCAGGTTCTACCAGCGAATCTCCTTCTGGCACCGCTCCAGGTTCTACTAGC | |
| | GAATCCCCGTCTGGTACCGCACCAGGTACTTCTCCTAGCGGCGAATCTTCTACCG | |
| | CACCAGGTTCTACCAGCTCTACTGCTGAATCTCCGGGTCCAGGTACTTCCCCGAG | |
| | CGGTGAATCTTCTACTGCACCAGGTACTTCTACTCCGGAAAGCGGTTCCGCTTCT | |
| | CCAGGTACCTCCCCTAGCGGCGAATCTTCTACTGCTCCAGGTACCTCTCCTAGCG | |
| | GCGAATCTTCTACCGCTCCAGGTACCTCCCCTAGCGGTGAATCTTCTACCGCACC | |
| | AGGTTCTACTAGCTCTACTGCTGAATCTCCGGGTCCAGGTTCTACCAGCTCTACT | |
| | GCTGAATCTCCTGGTCCAGGTACCTCCCCGAGCGGTGAATCTTCTACTGCACCA | |
| | GGTTCTAGCCCTTCTGCTTCCACCGGTACCGGCCCAGGTAGCTCTACTCCGTCTG | |
| | GTGCAACTGGCTCTCCAGGTAGCTCTACTCCGTCTGGTGCAACCGGCTCCCCA | |
| | XXXX was inserted in two areas where no sequence | |
| | information is available. | |
| AG864 | GGTGCTTCCCCGGGCACCAGCTCTACTGGTTCTCCAGGTTCTAGCCCGTCTGCTT | 169 |
| | CTACTGGTACTGGTCCAGGTTCTAGCCCTTCTGCTTCCACTGGTACTGGTCCAGG | |
| | TACCCCGGGTAGCGGTACCGCTTCTTCTTCTCCAGGTAGCTCTACTCCGTCTGGT | |
| | GCTACCGGCTCTCCAGGTTCTAACCCTTCTGCATCCACCGGTACCGGCCCAGGTG | |
| | CTTCTCCGGGCACCAGCTCTACTGGTTCTCCAGGTACCCCGGGCAGCGGTACCG | |
| | CATCTTCTTCTCCAGGTAGCTCTACTCCTTCTGGTGCAACTGGTTCTCCAGGTAC | |
| | TCCTGGCAGCGGTACCGCTTCTTCTTCTCCAGGTGCTTCTCCTGGTACTAGCTCT | |
| | ACTGGTTCTCCAGGTGCTTCTCCGGGCACTAGCTCTACTGGTTCTCCAGGTACCC | |
| | CGGGTAGCGGTACTGCTTCTTCCTCTCCAGGTAGCTCTACCCCTTCTGGTGCAAC | |
| | CGGCTCTCCAGGTGCTTCTCCGGGCACCAGCTCTACCGGTTCTCCAGGTACCCCG | |
| | GGTAGCGGTACCGCTTCTTCTTCTCCAGGTAGCTCTACTCCGTCTGGTGCTACCG | |
| | GCTCTCCAGGTTCTAACCCTTCTGCATCCACCGGTACCGGCCCAGGTTCTAGCCC | |
| | TTCTGCTTCCACCGGTACTGGCCCAGGTAGCTCTACCCCTTCTGGTGCTACCGGC | |
| | TCCCCAGGTAGCTCTACTCCTTCTGGTGCAACTGGCTCTCCAGGTGCATCTCCGG | |
| | GCACTAGCTCTACTGGTTCTCCAGGTGCATCCCCTGGCACTAGCTCTACTGGTTC | |
| | TCCAGGTGCTTCTCCTGGTACCAGCTCTACTGGTTCTCCAGGTACTCCTGGCAGC | |
| | GGTACCGCTTCTTCTTCTCCAGGTGCTTCTCCTGGTACTAGCTCTACTGGTTCTCC | |
| | AGGTGCTTCTCCGGGCACTAGCTCTACTGGTTCTCCAGGTGCTTCCCCGGGCACT | |
| | AGCTCTACCGGTTCTCCAGGTTCTAGCCCTTCTGCATCTACTGGTACTGGCCCAG | |
| | GTACTCCGGGCAGCGGTACTGCTTCTTCCTCTCCAGGTGCATCTCCGGGCACTAG | |
| | CTCTACTGGTTCTCCAGGTGCATCCCCTGGCACTAGCTCTACTGGTTCTCCAGGT | |
| | GCTTCTCCTGGTACCAGCTCTACTGGTTCTCCAGGTAGCTCTACTCCGTCTGGTG | |
| | CAACCGGTTCCCCAGGTAGCTCTACTCCTTCTGGTGCTACTGGCTCCCCAGGTGC | |
| | ATCCCCTGGCACCAGCTCTACCGGTTCTCCAGGTACCCCGGGCAGCGGTACCGC | |
| | ATCTTCCTCTCCAGGTAGCTCTACCCCGTCTGGTGCTACCGGTTCCCCAGGTAGC | |
| | TCTACCCCGTCTGGTGCAACCGGCTCCCCAGGTAGCTCTACTCCGTCTGGTGCAA | |
| | CCGGCTCCCCAGGTTCTAGCCCGTCTGCTTCCACTGGTACTGGCCCAGGTGCTTC | |
| | CCCGGGCACCAGCTCTACTGGTTCTCCAGGTGCATCCCCGGGTACCAGCTCTAC | |
| | CGGTTCTCCAGGTACTCCTGGCAGCGGTACTGCATCTTCCTCTCCAGGTGCTTCT | |
| | CCGGGCACCAGCTCTACTGGTTCTCCAGGTGCATCTCCGGGCACTAGCTCTACTG | |
| | GTTCTCCAGGTGCATCCCCTGGCACTAGCTCTACTGGTTCTCCAGGTGCTTCTCC | |
| | TGGTACCAGCTCTACTGGTTCTCCAGGTACCCCTGGTAGCGGTACTGCTTCTTCC | |
| | TCTCCAGGTAGCTCTACTCCGTCTGGTGCTACCGGTTCTCCAGGTACCCCGGGTA | |
| | GCGGTACCGCATCTTCTTCTCCAGGTAGCTCTACCCCGTCTGGTGCTACTGGTTC | |
| | TCCAGGTACTCCGGGCAGCGGTACTGCTTCTTCCTCTCCAGGTAGCTCTACCCCT | |
| | TCTGGTGCTACTGGCTCTCCAGGTAGCTCTACCCCGTCTGGTGCTACTGGCTCCC | |
| | CAGGTTCTAGCCCTTCTGCATCCACCGGTACCGGTCCAGGTTCTAGCCCGTCTGC | |
| | ATCTACTGGTACTGGTCCAGGTGCATCCCCGGGCACTAGCTCTACCGGTTCTCCA | |
| | GGTACTCCTGGTAGCGGTACTGCTTCTTCTTCTCCAGGTAGCTCTACTCCTTCTG | |
| | GTGCTACTGGTTCTCCAGGTTCTAGCCCTTCTGCATCCACCGGTACCGGCCCAGG | |
| | TTCTAGCCCGTCTGCTTCTACCGGTACTGGTCCAGGTGCTTCTCCGGGTACTAGC | |
| | TCTACTGGTTCTCCAGGTGCATCTCCTGGTACTAGCTCTACTGGTTCTCCAGGTA | |
| | GCTCTACTCCGTCTGGTGCAACCGGCTCTCCAGGTTCTAGCCCTTCTGCATCTAC | |
| | CGGTACTGGTCCAGGTGCATCCCCTGGTACCAGCTCTACCGGTTCTCCAGGTTCT | |
| | AGCCCTTCTGCTTCTACCGGTACCGGTCCAGGTACCCCTGGCAGCGGTACCGCA | |
| | TCTTCCTCTCCAGGTAGCTCTACTCCGTCTGGTGCAACCGGTTCCCCAGGTAGCT | |
| | CTACTCCTTCTGGTGCTACTGGCTCCCCAGGTGCATCCCCTGGCACCAGCTCTAC | |
| | CGGTTCTCCA | |
| AM923 | ATGGCTGAACCTGCTGGCTCTCCAACCTCCACTGAGGAAGGTGCATCCCCGGGC | 170 |
| | ACCAGCTCTACCGGTTCTCCAGGTAGCTCTACCCCGTCTGGTGCTACCGGCTCTC | |
| | CAGGTAGCTCTACCCCGTCTGGTGCTACTGGCTCTCCAGGTACTTCTACTGAACC | |
| | GTCTGAAGGCAGCGCACCAGGTAGCGAACCGGCTACTTCCGGTTCTGAAACCCC | |
| | AGGTAGCCCAGCAGGTTCTCCAACTTCTACTGAAGAAGGTTCTACCAGCTCTAC | |
| | CGCAGAATCTCCTGGTCCAGGTACCTCTACTCCGGAAAGCGGCTCTGCATCTCC | |
| | AGGTTCTACTAGCGAATCTCCTTCTGGCACTGCACCAGGTTCTACTAGCGAATCC | |
| | CCGTCTGGTACTGCTCCAGGTACTTCTACTCCTGAAAGCGGTTCCGCTTCTCCAG | |
| | GTACCTCTACTCCGGAAAGCGGTTCTGCATCTCCAGGTAGCGAACCGGCAACCT | |
| | CCGGCTCTGAAACCCCAGGTACCTCTGAAAGCGCTACTCCTGAATCCGGCCCAG | |
| | GTAGCCCGGCAGGTTCTCCGACTTCCACTGAGGAAGGTACCTCTACTGAACCTT | |
| | CTGAGGGCAGCGCTCCAGGTACTTCTGAAAGCGCTACCCCGGAGTCCGGTCCAG | |
| | GTACTTCTACTGAACCGTCCGAAGGTAGCGCACCAGGTACTTCTACCGAACCGT | |
| | CCGAGGGTAGCGCACCAGGTAGCCCAGCAGGTTCTCCTACCTCCACCGAGGAAG | |
| | GTACTTCTACCGAACCGTCCGAGGGTAGCGCACCAGGTACTTCTACCGAACCTT | |
| | CCGAGGGCAGCGCACCAGGTACTTCTGAAAGCGCTACCCCTGAGTCCGGCCCAG | |
| | GTACTTCTGAAAGCGCTACTCCTGAATCCGGTCCAGGTACCTCTACTGAACCTTC | |
| | CGAAGGCAGCGCTCCAGGTACCTCTACCGAACCGTCCGAGGGCAGCGCACCAG | |
| | GTACTTCTGAAAGCGCAACCCCTGAATCCGGTCCAGGTACTTCTACTGAACCTTC | |
| | CGAAGGTAGCGCTCCAGGTAGCGAACCTGCTACTTCTGGTTCTGAAACCCCAGG | |
| | TAGCCCGGCTGGCTCTCCGACCTCCACCGAGGAAGGTAGCTCTACCCCGTCTGG | |
| | TGCTACTGGTTCTCCAGGTACTCCGGGCAGCGGTACTGCTTCTTCCTCTCCAGGT | |
| | AGCTCTACCCCTTCTGGTGCTACTGGCTCTCCAGGTACCTCTACCGAACCGTCCG | |
| | AGGGTAGCGCACCAGGTACCTCTACTGAACCGTCTGAGGGTAGCGCTCCAGGTA | |
| | GCGAACCGGCAACCTCCGGTTCTGAAACTCCAGGTAGCCCTGCTGGCTCTCCGA | |
| | CTTCTACTGAGGAAGGTAGCCCGGCTGGTTCTCCGACTTCTACTGAGGAAGGTA | |
| | CTTCTACCGAACCTTCCGAAGGTAGCGCTCCAGGTGCAAGCGCAAGCGGCGCGC | |
| | CAAGCACGGGAGGTACTTCTGAAAGCGCTACTCCTGAGTCCGGCCCAGGTAGCC | |
| | CGGCTGGCTCTCCGACTTCCACCGAGGAAGGTAGCCCGGCTGGCTCTCCAACTT | |
| | CTACTGAAGAAGGTTCTACCAGCTCTACCGCTGAATCTCCTGGCCCAGGTTCTAC | |
| | TAGCGAATCTCCGTCTGGCACCGCACCAGGTACTTCCCCTAGCGGTGAATCTTCT | |
| | ACTGCACCAGGTACCCCTGGCAGCGGTACCGCTTCTTCCTCTCCAGGTAGCTCTA | |
| | CCCCGTCTGGTGCTACTGGCTCTCCAGGTTCTAGCCCGTCTGCATCTACCGGTAC | |
| | CGGCCCAGGTAGCGAACCGGCAACCTCCGGCTCTGAAACTCCAGGTACTTCTGA | |
| | AAGCGCTACTCCGGAATCCGGCCCAGGTAGCGAACCGGCTACTTCCGGCTCTGA | |
| | AACCCCAGGTTCCACCAGCTCTACTGCAGAATCTCCGGGCCCAGGTTCTACTAG | |
| | CTCTACTGCAGAATCTCCGGGTCCAGGTACTTCTCCTAGCGGCGAATCTTCTACC | |
| | GCTCCAGGTAGCGAACCGGCAACCTCTGGCTCTGAAACTCCAGGTAGCGAACCT | |
| | GCAACCTCCGGCTCTGAAACCCCAGGTACTTCTACTGAACCTTCTGAGGGCAGC | |
| | GCACCAGGTTCTACCAGCTCTACCGCAGAATCTCCTGGTCCAGGTACCTCTACTC | |
| | CGGAAAGCGGCTCTGCATCTCCAGGTTCTACTAGCGAATCTCCTTCTGGCACTGC | |
| | ACCAGGTACTTCTACCGAACCGTCCGAAGGCAGCGCTCCAGGTACCTCTACTGA | |
| | ACCTTCCGAGGGCAGCGCTCCAGGTACCTCTACCGAACCTTCTGAAGGTAGCGC | |
| | ACCAGGTAGCTCTACTCCGTCTGGTGCAACCGGCTCCCCAGGTTCTAGCCCGTCT | |
| | GCTTCCACTGGTACTGGCCCAGGTGCTTCCCCGGGCACCAGCTCTACTGGTTCTC | |
| | CAGGTAGCGAACCTGCTACCTCCGGTTCTGAAACCCCAGGTACCTCTGAAAGCG | |
| | CAACTCCGGAGTCTGGTCCAGGTAGCCCTGCAGGTTCTCCTACCTCCACTGAGG | |
| | AAGGTAGCTCTACTCCGTCTGGTGCAACCGGCTCCCCAGGTTCTAGCCCGTCTGC | |
| | TTCCACTGGTACTGGCCCAGGTGCTTCCCCGGGCACCAGCTCTACTGGTTCTCCA | |
| | GGTACCTCTGAAAGCGCTACTCCGGAGTCTGGCCCAGGTACCTCTACTGAACCG | |
| | TCTGAGGGTAGCGCTCCAGGTACTTCTACTGAACCGTCCGAAGGTAGCGCACCA | |
| AE912 | ATGGCTGAACCTGCTGGCTCTCCAACCTCCACTGAGGAAGGTACCCCGGGTAGC | 171 |
| | GGTACTGCTTCTTCCTCTCCAGGTAGCTCTACCCCTTCTGGTGCAACCGGCTCTC | |
| | CAGGTGCTTCTCCGGGCACCAGCTCTACCGGTTCTCCAGGTAGCCCGGCTGGCT | |
| | CTCCTACCTCTACTGAGGAAGGTACTTCTGAAAGCGCTACTCCTGAGTCTGGTCC | |
| | AGGTACCTCTACTGAACCGTCCGAAGGTAGCGCTCCAGGTAGCCCAGCAGGCTC | |
| | TCCGACTTCCACTGAGGAAGGTACTTCTACTGAACCTTCCGAAGGCAGCGCACC | |
| | AGGTACCTCTACTGAACCTTCTGAGGGCAGCGCTCCAGGTACTTCTGAAAGCGC | |
| | TACCCCGGAATCTGGCCCAGGTAGCGAACCGGCTACTTCTGGTTCTGAAACCCC | |
| | AGGTAGCGAACCGGCTACCTCCGGTTCTGAAACTCCAGGTAGCCCGGCAGGCTC | |
| | TCCGACCTCTACTGAGGAAGGTACTTCTGAAAGCGCAACCCCGGAGTCCGGCCC | |
| | AGGTACCTCTACCGAACCGTCTGAGGGCAGCGCACCAGGTACTTCTACCGAACC | |
| | GTCCGAGGGTAGCGCACCAGGTAGCCCAGCAGGTTCTCCTACCTCCACCGAGGA | |
| | AGGTACTTCTACCGAACCGTCCGAGGGTAGCGCACCAGGTACCTCTACTGAACC | |
| | TTCTGAGGGCAGCGCTCCAGGTACTTCTGAAAGCGCTACCCCGGAGTCCGGTCC | |
| | AGGTACTTCTACTGAACCGTCCGAAGGTAGCGCACCAGGTACTTCTGAAAGCGC | |
| | AACCCCTGAATCCGGTCCAGGTAGCGAACCGGCTACTTCTGGCTCTGAGACTCC | |
| | AGGTACTTCTACCGAACCGTCCGAAGGTAGCGCACCAGGTACTTCTACTGAACC | |
| | GTCTGAAGGTAGCGCACCAGGTACTTCTGAAAGCGCAACCCCGGAATCCGGCCC | |
| | AGGTACCTCTGAAAGCGCAACCCCGGAGTCCGGCCCAGGTAGCCCTGCTGGCTC | |
| | TCCAACCTCCACCGAAGAAGGTACCTCTGAAAGCGCAACCCCTGAATCCGGCCC | |
| | AGGTAGCGAACCGGCAACCTCCGGTTCTGAAACCCCAGGTACCTCTGAAAGCGC | |
| | TACTCCGGAGTCTGGCCCAGGTACCTCTACTGAACCGTCTGAGGGTAGCGCTCC | |
| | AGGTACTTCTACTGAACCGTCCGAAGGTAGCGCACCAGGTACTTCTACCGAACC | |
| | GTCCGAAGGCAGCGCTCCAGGTACCTCTACTGAACCTTCCGAGGGCAGCGCTCC | |
| | AGGTACCTCTACCGAACCTTCTGAAGGTAGCGCACCAGGTACTTCTACCGAACC | |
| | GTCCGAGGGTAGCGCACCAGGTAGCCCAGCAGGTTCTCCTACCTCCACCGAGGA | |
| | AGGTACTTCTACCGAACCGTCCGAGGGTAGCGCACCAGGTACCTCTGAAAGCGC | |
| | AACTCCTGAGTCTGGCCCAGGTAGCGAACCTGCTACCTCCGGCTCTGAGACTCC | |
| | AGGTACCTCTGAAAGCGCAACCCCGGAATCTGGTCCAGGTAGCGAACCTGCAAC | |
| | CTCTGGCTCTGAAACCCCAGGTACCTCTGAAAGCGCTACTCCTGAATCTGGCCC | |
| | AGGTACTTCTACTGAACCGTCCGAGGGCAGCGCACCAGGTACTTCTGAAAGCGC | |
| | TACTCCTGAGTCCGGCCCAGGTAGCCCGGCTGGCTCTCCGACTTCCACCGAGGA | |
| | AGGTAGCCCGGCTGGCTCTCCAACTTCTACTGAAGAAGGTAGCCCGGCAGGCTC | |
| | TCCGACCTCTACTGAGGAAGGTACTTCTGAAAGCGCAACCCCGGAGTCCGGCCC | |
| | AGGTACCTCTACCGAACCGTCTGAGGGCAGCGCACCAGGTACCTCTGAAAGCGC | |
| | AACTCCTGAGTCTGGCCCAGGTAGCGAACCTGCTACCTCCGGCTCTGAGACTCC | |
| | AGGTACCTCTGAAAGCGCAACCCCGGAATCTGGTCCAGGTAGCGAACCTGCAAC | |
| | CTCTGGCTCTGAAACCCCAGGTACCTCTGAAAGCGCTACTCCTGAATCTGGCCC | |
| | AGGTACTTCTACTGAACCGTCCGAGGGCAGCGCACCAGGTAGCCCTGCTGGCTC | |
| | TCCAACCTCCACCGAAGAAGGTACCTCTGAAAGCGCAACCCCTGAATCCGGCCC | |
| | AGGTAGCGAACCGGCAACCTCCGGTTCTGAAACCCCAGGTACTTCTGAAAGCGC | |
| | TACTCCTGAGTCCGGCCCAGGTAGCCCGGCTGGCTCTCCGACTTCCACCGAGGA | |
| | AGGTAGCCCGGCTGGCTCTCCAACTTCTACTGAAGAAGGTACTTCTACCGAACC | |
| | TTCCGAGGGCAGCGCACCAGGTACTTCTGAAAGCGCTACCCCTGAGTCCGGCCC | |
| | AGGTACTTCTGAAAGCGCTACTCCTGAATCCGGTCCAGGTACTTCTGAAAGCGC | |
| | TACCCCGGAATCTGGCCCAGGTAGCGAACCGGCTACTTCTGGTTCTGAAACCCC | |
| | AGGTAGCGAACCGGCTACCTCCGGTTCTGAAACTCCAGGTAGCCCAGCAGGCTC | |
| | TCCGACTTCCACTGAGGAAGGTACTTCTACTGAACCTTCCGAAGGCAGCGCACC | |
| | AGGTACCTCTACTGAACCTTCTGAGGGCAGCGCTCCAGGTAGCGAACCTGCAAC | |
| | CTCTGGCTCTGAAACCCCAGGTACCTCTGAAAGCGCTACTCCTGAATCTGGCCC | |
| | AGGTACTTCTACTGAACCGTCCGAGGGCAGCGCACCA | |
| AM1296 | GGTACTTCTACTGAACCGTCTGAAGGCAGCGCACCAGGTAGCGAACCGGCTACT | 172 |
| | TCCGGTTCTGAAACCCCAGGTAGCCCAGCAGGTTCTCCAACTTCTACTGAAGAA | |
| | GGTTCTACCAGCTCTACCGCAGAATCTCCTGGTCCAGGTACCTCTACTCCGGAA | |
| | AGCGGCTCTGCATCTCCAGGTTCTACTAGCGAATCTCCTTCTGGCACTGCACCAG | |
| | GTTCTACTAGCGAATCCCCGTCTGGTACTGCTCCAGGTACTTCTACTCCTGAAAG | |
| | CGGTTCCGCTTCTCCAGGTACCTCTACTCCGGAAAGCGGTTCTGCATCTCCAGGT | |
| | AGCGAACCGGCAACCTCCGGCTCTGAAACCCCAGGTACCTCTGAAAGCGCTACT | |
| | CCTGAATCCGGCCCAGGTAGCCCGGCAGGTTCTCCGACTTCCACTGAGGAAGGT | |
| | ACCTCTACTGAACCTTCTGAGGGCAGCGCTCCAGGTACTTCTGAAAGCGCTACC | |
| | CCGGAGTCCGGTCCAGGTACTTCTACTGAACCGTCCGAAGGTAGCGCACCAGGT | |
| | ACTTCTACCGAACCGTCCGAGGGTAGCGCACCAGGTAGCCCAGCAGGTTCTCCT | |
| | ACCTCCACCGAGGAAGGTACTTCTACCGAACCGTCCGAGGGTAGCGCACCAGGT | |
| | ACTTCTACCGAACCTTCCGAGGGCAGCGCACCAGGTACTTCTGAAAGCGCTACC | |
| | CCTGAGTCCGGCCCAGGTACTTCTGAAAGCGCTACTCCTGAATCCGGTCCAGGT | |
| | ACCTCTACTGAACCTTCCGAAGGCAGCGCTCCAGGTACCTCTACCGAACCGTCC | |
| | GAGGGCAGCGCACCAGGTACTTCTGAAAGCGCAACCCCTGAATCCGGTCCAGGT | |
| | ACTTCTACTGAACCTTCCGAAGGTAGCGCTCCAGGTAGCGAACCTGCTACTTCT | |
| | GGTTCTGAAACCCCAGGTAGCCCGGCTGGCTCTCCGACCTCCACCGAGGAAGGT | |
| | AGCTCTACCCCGTCTGGTGCTACTGGTTCTCCAGGTACTCCGGGCAGCGGTACTG | |
| | CTTCTTCCTCTCCAGGTAGCTCTACCCCTTCTGGTGCTACTGGCTCTCCAGGTAC | |
| | CTCTACCGAACCGTCCGAGGGTAGCGCACCAGGTACCTCTACTGAACCGTCTGA | |
| | GGGTAGCGCTCCAGGTAGCGAACCGGCAACCTCCGGTTCTGAAACTCCAGGTAG | |
| | CCCTGCTGGCTCTCCGACTTCTACTGAGGAAGGTAGCCCGGCTGGTTCTCCGACT | |
| | TCTACTGAGGAAGGTACTTCTACCGAACCTTCCGAAGGTAGCGCTCCAGGTCCA | |
| | GAACCAACGGGGCCGGCCCCAAGCGGAGGTAGCGAACCGGCAACCTCCGGCTC | |
| | TGAAACCCCAGGTACCTCTGAAAGCGCTACTCCTGAATCCGGCCCAGGTAGCCC | |
| | GGCAGGTTCTCCGACTTCCACTGAGGAAGGTACTTCTGAAAGCGCTACTCCTGA | |
| | GTCCGGCCCAGGTAGCCCGGCTGGCTCTCCGACTTCCACCGAGGAAGGTAGCCC | |
| | GGCTGGCTCTCCAACTTCTACTGAAGAAGGTACTTCTGAAAGCGCTACTCCTGA | |
| | GTCCGGCCCAGGTAGCCCGGCTGGCTCTCCGACTTCCACCGAGGAAGGTAGCCC | |
| | GGCTGGCTCTCCAACTTCTACTGAAGAAGGTTCTACCAGCTCTACCGCTGAATCT | |
| | CCTGGCCCAGGTTCTACTAGCGAATCTCCGTCTGGCACCGCACCAGGTACTTCCC | |
| | CTAGCGGTGAATCTTCTACTGCACCAGGTTCTACCAGCGAATCTCCTTCTGGCAC | |
| | CGCTCCAGGTTCTACTAGCGAATCCCCGTCTGGTACCGCACCAGGTACTTCTCCT | |
| | AGCGGCGAATCTTCTACCGCACCAGGTACTTCTACCGAACCTTCCGAGGGCAGC | |
| | GCACCAGGTACTTCTGAAAGCGCTACCCCTGAGTCCGGCCCAGGTACTTCTGAA | |
| | AGCGCTACTCCTGAATCCGGTCCAGGTAGCGAACCGGCAACCTCTGGCTCTGAA | |
| | ACCCCAGGTACCTCTGAAAGCGCTACTCCGGAATCTGGTCCAGGTACTTCTGAA | |
| | AGCGCTACTCCGGAATCCGGTCCAGGTACCTCTACTGAACCTTCTGAGGGCAGC | |
| | GCTCCAGGTACTTCTGAAAGCGCTACCCCGGAGTCCGGTCCAGGTACTTCTACT | |
| | GAACCGTCCGAAGGTAGCGCACCAGGTACCTCCCCTAGCGGCGAATCTTCTACT | |
| | GCTCCAGGTACCTCTCCTAGCGGCGAATCTTCTACCGCTCCAGGTACCTCCCCTA | |
| | GCGGTGAATCTTCTACCGCACCAGGTACTTCTACCGAACCGTCCGAGGGTAGCG | |
| | CACCAGGTAGCCCAGCAGGTTCTCCTACCTCCACCGAGGAAGGTACTTCTACCG | |
| | AACCGTCCGAGGGTAGCGCACCAGGTTCTAGCCCTTCTGCTTCCACCGGTACCG | |
| | GCCCAGGTAGCTCTACTCCGTCTGGTGCAACTGGCTCTCCAGGTAGCTCTACTCC | |
| | GTCTGGTGCAACCGGCTCCCCAGGTAGCTCTACCCCGTCTGGTGCTACCGGCTCT | |
| | CCAGGTAGCTCTACCCCGTCTGGTGCAACCGGCTCCCCAGGTGCATCCCCGGGT | |
| | ACTAGCTCTACCGGTTCTCCAGGTGCAAGCGCAAGCGGCGCGCCAAGCACGGG | |
| | AGGTACTTCTCCGAGCGGTGAATCTTCTACCGCACCAGGTTCTACTAGCTCTACC | |
| | GCTGAATCTCCGGGCCCAGGTACTTCTCCGAGCGGTGAATCTTCTACTGCTCCAG | |
| | GTACCTCTGAAAGCGCTACTCCGGAGTCTGGCCCAGGTACCTCTACTGAACCGT | |
| | CTGAGGGTAGCGCTCCAGGTACTTCTACTGAACCGTCCGAAGGTAGCGCACCAG | |
| | GTTCTAGCCCTTCTGCATCTACTGGTACTGGCCCAGGTAGCTCTACTCCTTCTGG | |
| | TGCTACCGGCTCTCCAGGTGCTTCTCCGGGTACTAGCTCTACCGGTTCTCCAGGT | |
| | ACTTCTACTCCGGAAAGCGGTTCCGCATCTCCAGGTACTTCTCCTAGCGGTGAAT | |
| | CTTCTACTGCTCCAGGTACCTCTCCTAGCGGCGAATCTTCTACTGCTCCAGGTAC | |
| | TTCTGAAAGCGCAACCCCTGAATCCGGTCCAGGTAGCGAACCGGCTACTTCTGG | |
| | CTCTGAGACTCCAGGTACTTCTACCGAACCGTCCGAAGGTAGCGCACCAGGTTC | |
| | TACCAGCGAATCCCCTTCTGGTACTGCTCCAGGTTCTACCAGCGAATCCCCTTCT | |
| | GGCACCGCACCAGGTACTTCTACCCCTGAAAGCGGCTCCGCTTCTCCAGGTAGC | |
| | CCGGCAGGCTCTCCGACCTCTACTGAGGAAGGTACTTCTGAAAGCGCAACCCCG | |
| | GAGTCCGGCCCAGGTACCTCTACCGAACCGTCTGAGGGCAGCGCACCAGGTAGC | |
| | CCTGCTGGCTCTCCAACCTCCACCGAAGAAGGTACCTCTGAAAGCGCAACCCCT | |
| | GAATCCGGCCCAGGTAGCGAACCGGCAACCTCCGGTTCTGAAACCCCAGGTAGC | |
| | TCTACCCCGTCTGGTGCTACCGGTTCCCCAGGTGCTTCTCCTGGTACTAGCTCTA | |
| | CCGGTTCTCCAGGTAGCTCTACCCCGTCTGGTGCTACTGGCTCTCCAGGTTCTAC | |
| | TAGCGAATCCCCGTCTGGTACTGCTCCAGGTACTTCCCCTAGCGGTGAATCTTCT | |
| | ACTGCTCCAGGTTCTACCAGCTCTACCGCAGAATCTCCGGGTCCAGGTAGCTCT | |
| | ACCCCTTCTGGTGCAACCGGCTCTCCAGGTGCATCCCCGGGTACCAGCTCTACC | |
| | GGTTCTCCAGGTACTCCGGGTAGCGGTACCGCTTCTTCCTCTCCAGGTAGCCCTG | |
| | CTGGCTCTCCGACTTCTACTGAGGAAGGTAGCCCGGCTGGTTCTCCGACTTCTAC | |
| | TGAGGAAGGTACTTCTACCGAACCTTCCGAAGGTAGCGCTCCA | |
| BC864 | GGTACTTCCACCGAACCATCCGAACCAGGTAGCGCAGGTACTTCCACCGAACCA | 173 |
| | TCCGAACCTGGCAGCGCAGGTAGCGAACCGGCAACCTCTGGTACTGAACCATCA | |
| | GGTAGCGGCGCATCCGAGCCTACCTCTACTGAACCAGGTAGCGAACCGGCTACC | |
| | TCCGGTACTGAGCCATCAGGTAGCGAACCGGCAACTTCCGGTACTGAACCATCA | |
| | GGTAGCGAACCGGCAACTTCCGGCACTGAACCATCAGGTAGCGGTGCATCTGAG | |
| | CCGACCTCTACTGAACCAGGTACTTCTACTGAACCATCTGAGCCGGGCAGCGCA | |
| | GGTAGCGAACCAGCTACTTCTGGCACTGAACCATCAGGTACTTCTACTGAACCA | |
| | TCCGAACCAGGTAGCGCAGGTAGCGAACCTGCTACCTCTGGTACTGAGCCATCA | |
| | GGTAGCGAACCGGCTACCTCTGGTACTGAACCATCAGGTACTTCTACCGAACCA | |
| | TCCGAGCCTGGTAGCGCAGGTACTTCTACCGAACCATCCGAGCCAGGCAGCGCA | |
| | GGTAGCGAACCGGCAACCTCTGGCACTGAGCCATCAGGTAGCGAACCAGCAAC | |
| | TTCTGGTACTGAACCATCAGGTACTAGCGAGCCATCTACTTCCGAACCAGGTGC | |
| | AGGTAGCGGCGCATCCGAACCTACTTCCACTGAACCAGGTACTAGCGAGCCATC | |
| | CACCTCTGAACCAGGTGCAGGTAGCGAACCGGCAACTTCCGGCACTGAACCATC | |
| | AGGTAGCGAACCGGCTACCTCTGGTACTGAACCATCAGGTACTTCTACCGAACC | |
| | ATCCGAGCCTGGTAGCGCAGGTACTTCTACCGAACCATCCGAGCCAGGCAGCGC | |
| | AGGTAGCGGTGCATCCGAGCCGACCTCTACTGAACCAGGTAGCGAACCAGCAA | |
| | CTTCTGGCACTGAGCCATCAGGTAGCGAACCAGCTACCTCTGGTACTGAACCAT | |
| | CAGGTAGCGAACCGGCTACTTCCGGCACTGAACCATCAGGTAGCGAACCAGCA | |
| | ACCTCCGGTACTGAACCATCAGGTACTTCCACTGAACCATCCGAACCGGGTAGC | |
| | GCAGGTAGCGAACCGGCAACTTCCGGCACTGAACCATCAGGTAGCGGTGCATCT | |
| | GAGCCGACCTCTACTGAACCAGGTACTTCTACTGAACCATCTGAGCCGGGCAGC | |
| | GCAGGTAGCGAACCTGCAACCTCCGGCACTGAGCCATCAGGTAGCGGCGCATCT | |
| | GAACCAACCTCTACTGAACCAGGTACTTCCACCGAACCATCTGAGCCAGGCAGC | |
| | GCAGGTAGCGGCGCATCTGAACCAACCTCTACTGAACCAGGTAGCGAACCAGC | |
| | AACTTCTGGTACTGAACCATCAGGTAGCGGCGCATCTGAGCCTACTTCCACTGA | |
| | ACCAGGTAGCGAACCGGCAACTTCCGGCACTGAACCATCAGGTAGCGGTGCATC | |
| | TGAGCCGACCTCTACTGAACCAGGTACTTCTACTGAACCATCTGAGCCGGGCAG | |
| | CGCAGGTAGCGAACCGGCAACTTCCGGCACTGAACCATCAGGTAGCGGTGCATC | |
| | TGAGCCGACCTCTACTGAACCAGGTACTTCTACTGAACCATCTGAGCCGGGCAG | |
| | CGCAGGTAGCGAACCAGCTACTTCTGGCACTGAACCATCAGGTACTTCTACTGA | |
| | ACCATCCGAACCAGGTAGCGCAGGTAGCGAACCTGCTACCTCTGGTACTGAGCC | |
| | ATCAGGTACTTCTACTGAACCATCCGAGCCGGGTAGCGCAGGTACTTCCACTGA | |
| | ACCATCTGAACCTGGTAGCGCAGGTACTTCCACTGAACCATCCGAACCAGGTAG | |
| | CGCAGGTACTTCTACTGAACCATCCGAGCCGGGTAGCGCAGGTACTTCCACTGA | |
| | ACCATCTGAACCTGGTAGCGCAGGTACTTCCACTGAACCATCCGAACCAGGTAG | |
| | CGCAGGTACTAGCGAACCATCCACCTCCGAACCAGGCGCAGGTAGCGGTGCATC | |
| | TGAACCGACTTCTACTGAACCAGGTACTTCCACTGAACCATCTGAGCCAGGTAG | |
| | CGCAGGTACTTCCACCGAACCATCCGAACCAGGTAGCGCAGGTACTTCCACCGA | |
| | ACCATCCGAACCTGGCAGCGCAGGTAGCGAACCGGCAACCTCTGGTACTGAACC | |
| | ATCAGGTAGCGGTGCATCCGAGCCGACCTCTACTGAACCAGGTAGCGAACCAGC | |
| | AACTTCTGGCACTGAGCCATCAGGTAGCGAACCAGCTACCTCTGGTACTGAACC | |
| | ATCAGGTAGCGAACCGGCAACCTCTGGCACTGAGCCATCAGGTAGCGAACCAG | |
| | CAACTTCTGGTACTGAACCATCAGGTACTAGCGAGCCATCTACTTCCGAACCAG | |
| | GTGCAGGTAGCGAACCTGCAACCTCCGGCACTGAGCCATCAGGTAGCGGCGCAT | |
| | CTGAACCAACCTCTACTGAACCAGGTACTTCCACCGAACCATCTGAGCCAGGCA | |
| | GCGCAGGTAGCGAACCTGCAACCTCCGGCACTGAGCCATCAGGTAGCGGCGCA | |
| | TCTGAACCAACCTCTACTGAACCAGGTACTTCCACCGAACCATCTGAGCCAGGC | |
| | AGCGCA | |
| BD864 | GGTAGCGAAACTGCTACTTCCGGCTCTGAGACTGCAGGTACTAGTGAATCCGCA | 174 |
| | ACTAGCGAATCTGGCGCAGGTAGCACTGCAGGCTCTGAGACTTCCACTGAAGCA | |
| | GGTACTAGCGAGTCCGCAACCAGCGAATCCGGCGCAGGTAGCGAAACTGCTAC | |
| | CTCTGGCTCCGAGACTGCAGGTAGCGAAACTGCAACCTCTGGCTCTGAAACTGC | |
| | AGGTACTTCCACTGAAGCAAGTGAAGGCTCCGCATCAGGTACTTCCACCGAAGC | |
| | AAGCGAAGGCTCCGCATCAGGTACTAGTGAGTCCGCAACTAGCGAATCCGGTGC | |
| | AGGTAGCGAAACCGCTACCTCTGGTTCCGAAACTGCAGGTACTTCTACCGAGGC | |
| | TAGCGAAGGTTCTGCATCAGGTAGCACTGCTGGTTCCGAGACTTCTACTGAAGC | |
| | AGGTACTAGCGAATCTGCTACTAGCGAATCCGGCGCAGGTACTAGCGAATCCGC | |
| | TACCAGCGAATCCGGCGCAGGTAGCGAAACTGCAACCTCTGGTTCCGAGACTGC | |
| | AGGTACTAGCGAGTCCGCTACTAGCGAATCTGGCGCAGGTACTTCCACTGAAGC | |
| | TAGTGAAGGTTCTGCATCAGGTAGCGAAACTGCTACTTCTGGTTCCGAAACTGC | |
| | AGGTAGCGAAACCGCTACCTCTGGTTCCGAAACTGCAGGTACTTCTACCGAGGC | |
| | TAGCGAAGGTTCTGCATCAGGTAGCACTGCTGGTTCCGAGACTTCTACTGAAGC | |
| | AGGTACTAGCGAGTCCGCTACTAGCGAATCTGGCGCAGGTACTTCCACTGAAGC | |
| | TAGTGAAGGTTCTGCATCAGGTAGCGAAACTGCTACTTCTGGTTCCGAAACTGC | |
| | AGGTAGCACTGCTGGCTCCGAGACTTCTACCGAAGCAGGTAGCACTGCAGGTTC | |
| | CGAAACTTCCACTGAAGCAGGTAGCGAAACTGCTACCTCTGGCTCTGAGACTGC | |
| | AGGTACTAGCGAATCTGCTACTAGCGAATCCGGCGCAGGTACTAGCGAATCCGC | |
| | TACCAGCGAATCCGGCGCAGGTAGCGAAACTGCAACCTCTGGTTCCGAGACTGC | |
| | AGGTACTAGCGAATCTGCTACTAGCGAATCCGGCGCAGGTACTAGCGAATCCGC | |
| | TACCAGCGAATCCGGCGCAGGTAGCGAAACTGCAACCTCTGGTTCCGAGACTGC | |
| | AGGTAGCGAAACCGCTACCTCTGGTTCCGAAACTGCAGGTACTTCTACCGAGGC | |
| | TAGCGAAGGTTCTGCATCAGGTAGCACTGCTGGTTCCGAGACTTCTACTGAAGC | |
| | AGGTAGCGAAACTGCTACTTCCGGCTCTGAGACTGCAGGTACTAGTGAATCCGC | |
| | AACTAGCGAATCTGGCGCAGGTAGCACTGCAGGCTCTGAGACTTCCACTGAAGC | |
| | AGGTAGCACTGCTGGTTCCGAAACCTCTACCGAAGCAGGTAGCACTGCAGGTTC | |
| | TGAAACCTCCACTGAAGCAGGTACTTCCACTGAGGCTAGTGAAGGCTCTGCATC | |
| | AGGTAGCACTGCTGGTTCCGAAACCTCTACCGAAGCAGGTAGCACTGCAGGTTC | |
| | TGAAACCTCCACTGAAGCAGGTACTTCCACTGAGGCTAGTGAAGGCTCTGCATC | |
| | AGGTAGCACTGCAGGTTCTGAGACTTCCACCGAAGCAGGTAGCGAAACTGCTAC | |
| | TTCTGGTTCCGAAACTGCAGGTACTTCCACTGAAGCTAGTGAAGGTTCCGCATC | |
| | AGGTACTAGTGAGTCCGCAACCAGCGAATCCGGCGCAGGTAGCGAAACCGCAA | |
| | CCTCCGGTTCTGAAACTGCAGGTACTAGCGAATCCGCAACCAGCGAATCTGGCG | |
| | CAGGTACTAGTGAGTCCGCAACCAGCGAATCCGGCGCAGGTAGCGAAACCGCA | |
| | ACCTCCGGTTCTGAAACTGCAGGTACTAGCGAATCCGCAACCAGCGAATCTGGC | |
| | GCAGGTAGCGAAACTGCTACTTCCGGCTCTGAGACTGCAGGTACTTCCACCGAA | |
| | GCAAGCGAAGGTTCCGCATCAGGTACTTCCACCGAGGCTAGTGAAGGCTCTGCA | |
| | TCAGGTAGCACTGCTGGCTCCGAGACTTCTACCGAAGCAGGTAGCACTGCAGGT | |
| | TCCGAAACTTCCACTGAAGCAGGTAGCGAAACTGCTACCTCTGGCTCTGAGACT | |
| | GCAGGTACTAGCGAATCTGCTACTAGCGAATCCGGCGCAGGTACTAGCGAATCC | |
| | GCTACCAGCGAATCCGGCGCAGGTAGCGAAACTGCAACCTCTGGTTCCGAGACT | |
| | GCAGGTAGCGAAACTGCTACTTCCGGCTCCGAGACTGCAGGTAGCGAAACTGCT | |
| | ACTTCTGGCTCCGAAACTGCAGGTACTTCTACTGAGGCTAGTGAAGGTTCCGCA | |
| | TCAGGTACTAGCGAGTCCGCAACCAGCGAATCCGGCGCAGGTAGCGAAACTGC | |
| | TACCTCTGGCTCCGAGACTGCAGGTAGCGAAACTGCAACCTCTGGCTCTGAAAC | |
| | TGCAGGTACTAGCGAATCTGCTACTAGCGAATCCGGCGCAGGTACTAGCGAATC | |
| | CGCTACCAGCGAATCCGGCGCAGGTAGCGAAACTGCAACCTCTGGTTCCGAGAC | |
| | TGCA | |

[0267] One may clone the library of XTEN-encoding genes into one or more expression vectors known in the art. To facilitate the identification of well-expressing library members, one can construct the library as fusion to a reporter protein. Non-limiting examples of suitable reporter genes are green fluorescent protein, luciferase, alkaline phosphatase, and beta-galactosidase. By screening, one can identify short XTEN sequences that can be expressed in high concentration in the host organism of choice. Subsequently, one can generate a library of random XTEN dimers and repeat the screen for high level of expression. Subsequently, one can screen the resulting constructs for a number of properties such as level of expression, protease stability, or binding to antiserum.

[0268] One aspect of the invention is to provide polynucleotide sequences encoding the components of the fusion protein wherein the creation of the sequence has undergone codon optimization. Of particular interest is codon optimization with the goal of improving expression of the polypeptide compositions and to improve the genetic stability of the encoding gene in the production hosts. For example, codon optimization is of particular importance for XTEN sequences that are rich in glycine or that have very repetitive amino acid sequences. Codon optimization can be performed using computer programs (Gustafsson, C., et al. (2004) Trends Biotechnol, 22: 346-53), some of which minimize ribosomal pausing (Coda Genomics Inc.). In one embodiment, one can perform codon optimization by constructing codon libraries where all members of the library encode the same amino acid sequence but where codon usage is varied. Such libraries can be screened for highly expressing and genetically stable members that are particularly suitable for the large-scale production of XTEN-containing products. When designing XTEN sequences one can consider a number of properties. One can minimize the repetitiveness in the encoding DNA sequences. In addition, one can avoid or minimize the use of codons that are rarely used by the production host (e.g. the AGG and AGA arginine codons and one leucine codon in E. coli). In the case of E. coli, two glycine codons, GGA and GGG, are rarely used in highly expressed proteins. Thus codon optimization of the gene encoding XTEN sequences can be very desirable. DNA sequences that have a high level of glycine tend to have a high GC content that can lead to instability or low expression levels. Thus, when possible, it is preferred to choose codons such that the GC-content of XTEN-encoding sequence is suitable for the production organism that will be used to manufacture the XTEN.

[0269] Optionally, the full-length XTEN-encoding gene may comprise one or more sequencing islands. In this context, sequencing islands are short-stretch sequences that are distinct from the XTEN library construct sequences and that include a restriction site not present or expected to be present in the full-length XTEN-encoding gene. In one embodiment, a sequencing island is the sequence 5′-AGGTGCAAGCGCAAGCGGCGCGCCAAGCACGGGAGGT-3′ (SEQ ID NO: 175). In another embodiment, a sequencing island is the sequence 5′-AGGTCCAGAACCAACGGGGCCGGCCCCAAGCGGAGGT-3′ (SEQ ID NO: 176).

[0270] As an alternative, one can construct codon libraries where all members of the library encode the same amino acid sequence but where codon usage is varied. Such libraries can be screened for highly expressing and genetically stable members that are particularly suitable for the large-scale production of XTEN-containing products.

[0271] Optionally, one can sequence clones in the library to eliminate isolates that contain undesirable sequences. The initial library of short XTEN sequences can allow some variation in amino acid sequence. For instance one can randomize some codons such that a number of hydrophilic amino acids can occur in a particular position.

[0272] During the process of iterative multimerization one can screen the resulting library members for other characteristics like solubility or protease resistance in addition to a screen for high-level expression.

[0273] Once the gene that encodes the XTEN of desired length and properties is selected, it is genetically fused to the nucleotides encoding the N- and/or the C-terminus of the BP gene(s) by cloning it into the construct adjacent and in frame with the gene coding for BP or adjacent to a spacer sequence. The invention provides various permutations of the foregoing, depending on the BFXTEN to be encoded. For example, a gene encoding a monomeric fusion protein comprising two BP such as embodied by formula (I) or (II), as depicted above, the gene would have polynucleotides encoding two BP, at least a first XTEN, and optionally a second XTEN and/or spacer sequences. The step of cloning the BP genes into the XTEN construct can occur through a ligation or multimerization step. As shown in FIG. 2, the constructs encoding BFXTEN fusion proteins can be designed in different configurations. In one embodiment, as illustrated in FIG. 2A, the constructs 200 encoding combination (two fusion protein) BFXTEN comprise polynucleotide sequences complementary to, or those that encode a monomeric polypeptide of components XTEN 202, BP1 203, BP2 204 and spacer sequences 205. In another embodiment, as illustrated in FIG. 2B, the construct comprises polynucleotide sequences complementary to, or those that encode a monomeric polypeptide of components in the following order (5′ to 3′) BP1 203 and XTEN 202 and BP2 204. In another embodiment, as illustrated in FIG. 2C, the construct 201 encodes a monomeric BXTEN comprising polynucleotide sequences complementary to, or those that encode components in the following order (5′ to 3′): BP1 203, XTEN 202, and BP2 204. In another embodiment, as illustrated in FIG. 2D, the construct comprises polynucleotide sequences complementary to, or those that encode a monomeric polypeptide of components in the following order (5′ to 3′): BP1 203; BP2 204; and XTEN 202. In another embodiment, as illustrated in FIG. 2E, the construct comprises polynucleotide sequences complementary to, or those that encode a monomeric polypeptide of components in the following order (5′ to 3′): XTEN 202; BP1 203; and BP2 204. In another embodiment, as illustrated in FIG. 2F, the construct comprises polynucleotide sequences complementary to, or those that encode a monomeric polypeptide of components in the following order (5′ to 3′): BP1 203; spacer sequences 205; BP2 204; and XTEN 202. In another embodiment, as illustrated in FIG. 2G, the construct comprises polynucleotide sequences complementary to, or those that encode a monomeric polypeptide of components in the following order (5′ to 3′): BP1 203; spacer sequences 205; BP2 204; and XTEN 202. The spacer polynucleotides can optionally comprise sequences encoding cleavage sequences. The invention also contemplates other permutations of the foregoing. Polynucleotide constructs can also be created that encode a polypeptide with multimers of BP and XTEN linked in alternating units.

[0274] The invention also encompasses polynucleotide variants that have a high percentage of sequence identity to (a) a polynucleotide sequence from Table 8, or (b) sequences that are complementary to the polynucleotides of (a). A polynucleotide with a high percentage of sequence identity is one that has at least about an 80% nucleic acid sequence identity, alternatively at least about 81%, alternatively at least about 82%, alternatively at least about 83%, alternatively at least about 84%, alternatively at least about 85%, alternatively at least about 86%, alternatively at least about 87%, alternatively at least about 88%, alternatively at least about 89%, alternatively at least about 90%, alternatively at least about 91%, alternatively at least about 92%, alternatively at least about 93%, alternatively at least about 94%, alternatively at least about 95%, alternatively at least about 96%, alternatively at least about 97%, alternatively at least about 98%, and alternatively at least about 99% nucleic acid sequence identity to (a) or (b) of the foregoing, or that can hybridize with the target polynucleotide or its complement under stringent conditions.

[0275] Homology, sequence similarity or sequence identity of nucleotide or amino acid sequences may also be determined conventionally by using known software or computer programs such as the BestFit or Gap pairwise comparison programs (GCG Wisconsin Package, Genetics Computer Group, 575 Science Drive, Madison, Wis. 53711). BestFit uses the local homology algorithm of Smith and Waterman (Advances in Applied Mathematics. 1981. 2: 482-489), to find the best segment of identity or similarity between two sequences. Gap performs global alignments: all of one sequence with all of another similar sequence using the method of Needleman and Wunsch, (Journal of Molecular Biology. 1970. 48:443-453). When using a sequence alignment program such as BestFit, to determine the degree of sequence homology, similarity or identity, the default setting may be used, or an appropriate scoring matrix may be selected to optimize identity, similarity or homology scores.

[0276] Nucleic acid sequences that are “complementary” are those that are capable of base-pairing according to the standard Watson-Crick complementarity rules. As used herein, the term “complementary sequences” means nucleic acid sequences that are substantially complementary, as may be assessed by the same nucleotide comparison set forth above, or as defined as being capable of hybridizing to the polynucleotides that encode the BFXTEN sequences under stringent conditions, such as those described herein.

[0277] The resulting polynucleotides encoding the BFXTEN chimeric compositions can then be individually cloned into an expression vector. The nucleic acid sequence may be inserted into the vector by a variety of procedures. In general, DNA is inserted into an appropriate restriction endonuclease site(s) using techniques known in the art. Vector components generally include, but are not limited to, one or more of a signal sequence, an origin of replication, one or more marker genes, an enhancer element, a promoter, and a transcription termination sequence. Construction of suitable vectors containing one or more of these components employs standard ligation techniques which are known to the skilled artisan. Such techniques are well known in the art and well described in the scientific and patent literature.

[0278] Various vectors are publicly available. The vector may, for example, be in the form of a plasmid, cosmid, viral particle, or phage. Both expression and cloning vectors contain a nucleic acid sequence that enables the vector to replicate in one or more selected host cells. Such vector sequences are well known for a variety of bacteria, yeast, and viruses. Useful expression vectors that can be used include, for example, segments of chromosomal, non-chromosomal and synthetic DNA sequences. Suitable vectors include, but are not limited to, derivatives of SV40 and pcDNA and known bacterial plasmids such as col EI, pCR1, pBR322, pMal-C2, pET, pGEX as described by Smith, et al., Gene 57:31-40 (1988), pMB9 and derivatives thereof, plasmids such as RP4, phage DNAs such as the numerous derivatives of phage I such as NM98 9, as well as other phage DNA such as M13 and filamentous single stranded phage DNA; yeast plasmids such as the 2 micron plasmid or derivatives of the 2 m plasmid, as well as centromeric and integrative yeast shuttle vectors; vectors useful in eukaryotic cells such as vectors useful in insect or mammalian cells; vectors derived from combinations of plasmids and phage DNAs, such as plasmids that have been modified to employ phage DNA or the expression control sequences; and the like. The requirements are that the vectors are replicable and viable in the host cell of choice. Low- or high-copy number vectors may be used as desired.

[0279] Promoters suitable for use in expression vectors with prokaryotic hosts include the β-lactamase and lactose promoter systems [Chang et al., Nature, 275:615 (1978); Goeddel et al., Nature, 281:544 (1979)], alkaline phosphatase, a tryptophan (trp) promoter system [Goeddel, Nucleic Acids Res., 8:4057 (1980); EP 36,776], and hybrid promoters such as the tac promoter [deBoer et al., Proc. Natl. Acad. Sci. USA, 80:21-25 (1983)]. Promoters for use in bacterial systems can also contain a Shine-Dalgarno (S.D.) sequence operably linked to the DNA encoding BFXTEN polypeptides.

[0280] For example, in a baculovirus expression system, both non-fusion transfer vectors, such as, but not limited to pVL941 (BamHI cloning site, available from Summers, et al., Virology 84:390-402 (1978)), pVL1393 (BamHI, Smal, Xbal, EcoRI, IVotl, Xmalll, BgIII and Pstl cloning sites; Invitrogen), pVL1392 (BgIII, Pstl, NotI, XmaIII, EcoRI, Xball, Smal and BamHI cloning site; Summers, et al., Virology 84:390-402 (1978) and Invitrogen) and pBlueBacIII (BamHI, BgIII, Pstl, Ncol and Hindi II cloning site, with blue/white recombinant screening, Invitrogen), and fusion transfer vectors such as, but not limited to, pAc7 00 (BamHI and Kpn1 cloning sites, in which the BamHI recognition site begins with the initiation codon; Summers, et al., Virology 84:390-402 (1978)), pAc701 and pAc70-2 (same as pAc700, with different reading frames), pAc360 [BamHI cloning site 36 base pairs downstream of a polyhedrin initiation codon; Invitrogen (1995)) and pBlueBacHisA, B, C (three different reading frames with BamH I, BgI II, Pstl, Nco l and Hind III cloning site, an N-terminal peptide for ProBond purification and blue/white recombinant screening of plaques; Invitrogen (220) can be used.

[0281] Mammalian expression vectors can comprise an origin of replication, a suitable promoter and enhancer, and also any necessary ribosome binding sites, polyadenylation site, splice donor and acceptor sites, transcriptional termination sequences, and 5′ flanking nontranscribed sequences. DNA sequences derived from the SV40 splice, and polyadenylation sites may be used to provide the required nontranscribed genetic elements. Mammalian expression vectors contemplated for use in the invention include vectors with inducible promoters, such as the dihydrofolate reductase promoters, any expression vector with a DHFR expression cassette or a DHFR/methotrexate co-amplification vector such as pED (Pstl, Sail, Sbal, Smal and EcoRI cloning sites, with the vector expressing both the cloned gene and DHFR; Randal J. Kaufman, 1991, Randal J. Kaufman, Current Protocols in Molecular Biology, 16, 12 (1991)). Alternatively a glutamine synthetase/methionine sulfoximine co-amplification vector, such as pEE14 (Hindlll, Xball, Smal, Sbal, EcoRI and Sell cloning sites in which the vector expresses glutamine synthetase and the cloned gene; Celltech). A vector that directs episomal expression under the control of the Epstein Barr Virus (EBV) or nuclear antigen (EBNA) can be used such as pREP4 (BamHI r SfH, Xhol, NotI, Nhel, Hindi II, NheI, PvuII and Kpnl cloning sites, constitutive RSV-LTR promoter, hygromycin selectable marker; Invitrogen), pCEP4 (BamHI, SfH, Xhol, NotI, Nhel, Hindlll, Nhel, PvuII and Kpnl cloning sites, constitutive hCMV immediate early gene promoter, hygromycin selectable marker; Invitrogen), pMEP4 (.Kpnl, Pvul, Nhel, Hindlll, NotI, Xhol, Sfil, BamHI cloning sites, inducible metallothionein H a gene promoter, hygromycin selectable marker, Invitrogen), pREP8 (BamHI, XhoI, NotI, Hindlll, Nhel and Kpnl cloning sites, RSV-LTR promoter, histidinol selectable marker; Invitrogen), pREP9 (Kpnl, Nhel, Hind lll, NotI, Xho l, Sfi l, BamH I cloning sites, RSV-LTR promoter, G418 selectable marker; Invitrogen), and pEBVHis (RSV-LTR promoter, hygromycin selectable marker, N-terminal peptide purifiable via ProBond resin and cleaved by enterokinase; Invitrogen).

[0282] Selectable mammalian expression vectors for use in the invention include, but are not limited to, pRc/CMV (Hind lll, BstXI, NotI, Sbal and Apal cloning sites, G418 selection, Invitrogen), pRc/RSV (Hind II, Spel, BstXI, NotI, Xbal cloning sites, G418 selection, Invitrogen) and the like. Vaccinia virus mammalian expression vectors (see, for example, Randall J. Kaufman, Current Protocols in Molecular Biology 16.12 (Frederick M. Ausubel, et al., eds. Wiley 1991) that can be used in the present invention include, but are not limited to, pSC11 (Smal cloning site, TK- and beta-gal selection), pMJ601 (Sal l, Sma l, A flI, Narl, BspMlI, BamHI, Apal, Nhel, SacII, Kpnl and Hindlll cloning sites; TK- and -gal selection), pTKgtFlS (EcoRI, Pstl, SaIII, Accl, HindII, Sbal, BamHI and Hpa cloning sites, TK or XPRT selection) and the like.

[0283] Yeast expression systems that can also be used in the present invention include, but are not limited to, the non-fusion pYES2 vector (XJbal, Sphl, Shol, NotI, GstXI, EcoRI, BstXI, BamHI, Sad, Kpnl and Hindlll cloning sites, Invitrogen), the fusion pYESHisA, B, C (Xball, Sphl, Shol, NotI, BstXI, EcoRI, BamHI, Sad, Kpnl and Hindi II cloning sites, N-terminal peptide purified with ProBond resin and cleaved with enterokinase; Invitrogen), pRS vectors and the like.

[0284] In addition, the expression vector containing the chimeric BFXTEN fusion protein-encoding polynucleotide molecule may include drug selection markers. Such markers aid in cloning and in the selection or identification of vectors containing chimeric DNA molecules. For example, genes that confer resistance to neomycin, puromycin, hygromycin, dihydrofolate reductase (DHFR) inhibitor, guanine phosphoribosyl transferase (GPT), zeocin, and histidinol are useful selectable markers. Alternatively, enzymes such as herpes simplex virus thymidine kinase (tk) or chloramphenicol acetyltransferase (CAT) may be employed. Immunologic markers also can be employed. Any known selectable marker may be employed so long as it is capable of being expressed simultaneously with the nucleic acid encoding a gene product. Further examples of selectable markers are well known to one of skill in the art and include reporters such as enhanced green fluorescent protein (EGFP), beta-galactosidase (β-gal) or chloramphenicol acetyltransferase (CAT).

[0285] In one embodiment, the polynucleotide encoding a BFXTEN fusion protein composition can be fused C-terminally to an N-terminal signal sequence appropriate for the expression host system. Signal sequences are typically proteolytically removed from the protein during the translocation and secretion process, generating a defined N-terminus. A wide variety of signal sequences have been described for most expression systems, including bacterial, yeast, insect, and mammalian systems. A non-limiting list of preferred examples for each expression system follows herein. Preferred signal sequences are OmpA, PhoA, and DsbA for E. coli expression. Signal peptides preferred for yeast expression are ppL-alpha, DEX4, invertase signal peptide, acid phosphatase signal peptide, CPY, or INU1. For insect cell expression the preferred signal sequences are sexta adipokinetic hormone precursor, CP1, CP2, CP3, CP4, TPA, PAP, or gp67. For mammalian expression the preferred signal sequences are IL2L, SV40, IgG kappa and IgG lambda.

[0286] In another embodiment, a leader sequence, potentially comprising a well-expressed, independent protein domain, can be fused to the N-terminus of the BFXTEN sequence, separated by a protease cleavage site. While any leader peptide sequence which does not inhibit cleavage at the designed proteolytic site can be used, sequences in preferred embodiments will comprise stable, well-expressed sequences such that expression and folding of the overall composition is not significantly adversely affected, and preferably expression, solubility, and/or folding efficiency are significantly improved. A wide variety of suitable leader sequences have been described in the literature. A non-limiting list of suitable sequences includes maltose binding protein, cellulose binding domain, glutathione S-transferase, 6×His tag (SEQ ID NO: 177), FLAG tag, hemaglutinin tag, and green fluorescent protein. The leader sequence can also be further improved by codon optimization, especially in the second codon position following the ATG start codon, by methods well described in the literature and hereinabove.

[0287] Various in vitro enzymatic methods for cleaving proteins at specific sites are known. Such methods include use of enterokinase (DDDK) (SEQ ID NO: 178), Factor Xa (IDGR) (SEQ ID NO: 179), thrombin (LVPR/GS) (SEQ ID NO: 180), PreScission™ (LEVLFQ/GP) (SEQ ID NO: 181), TEV protease (EQLYFQ/G) (SEQ ID NO: 182), 3C protease (ETLFQ/GP) (SEQ ID NO: 183), Sortase A (LPET/G) (SEQ ID NO: 2377), Granzyme B (D/X, N/X, M/N or S/X), inteins, SUMO, DAPase (TAGZyme™), Aeromonas aminopeptidase, Aminopeptidase M, and carboxypeptidases A and B. Additional methods are disclosed in Arnau, et al., Protein Expression and Purification 48: 1-13 (2006).

[0288] In another embodiment, an optimized polynucleotide sequence encoding at least about 20 to about 60 amino acids with XTEN characteristics can be included at the N-terminus of the XTEN sequence to promote the initiation of translation to allow for expression of XTEN fusions at the N-terminus of proteins without the presence of a helper domain. In the embodiment, the sequence does not require subsequent cleavage, thereby reducing the number of steps to manufacture XTEN-containing compositions. As described in more detail in the Examples, the optimized N-terminal sequence has attributes of an unstructured protein, but may include nucleotide bases encoding amino acids selected for their ability to promote initiation of translation and enhanced expression.

[0289] In another embodiment, the protease site of the leader sequence construct is chosen such that it is recognized by an in vivo protease. In this embodiment, the protein is purified from the expression system while retaining the leader by avoiding contact with an appropriate protease. The full-length construct is then injected into a patient. Upon injection, the construct comes into contact with the protease specific for the cleavage site and is cleaved by the protease. In the case where the uncleaved protein is substantially less active than the cleaved form, this method has the beneficial effect of allowing higher initial doses while avoiding toxicity, as the active form is generated slowly in vivo. Some non-limiting examples of in vivo proteases which are useful for this application include tissue kallikrein, plasma kallikrein, trypsin, pepsin, chymotrypsin, thrombin, and matrix metalloproteinases.

[0290] In this manner, a chimeric DNA molecule coding for a monomeric BFXTEN fusion protein is generated within the construct. Optionally, this chimeric DNA molecule may be transferred or cloned into another construct that is a more appropriate expression vector. At this point, a host cell capable of expressing the chimeric DNA molecule can be transformed with the chimeric DNA molecule. The vectors containing the DNA segments of interest can be transferred into the host cell by well-known methods, depending on the type of cellular host. For example, calcium chloride transfection is commonly utilized for prokaryotic cells, whereas calcium phosphate treatment, lipofection, or electroporation may be used for other cellular hosts. Other methods used to transform mammalian cells include the use of polybrene, protoplast fusion, liposomes, electroporation, and microinjection. See, generally, Sambrook, et al., supra.

[0291] The transformation may occur with or without the utilization of a carrier, such as an expression vector. Then, the transformed host cell is cultured under conditions suitable for expression of the chimeric DNA molecule encoding of BFXTEN.

[0292] The present invention also provides a host cell for expressing the monomeric fusion protein compositions disclosed herein. In those cases where the BFXTEN composition comprises two fusion proteins, each comprising a single BP, the invention provides a first host cell comprising the expression vector encoding the first fusion protein and a second host cell comprising the expression vector encoding the second fusion protein. Examples of suitable eukaryotic host cells include, but are not limited to mammalian cells, such as COS-1 (ATCC CRL 1650), COS-7 (ATCC CRL 1651), BHK-21 (ATCC CCL 10)) and BHK-293 (ATCC CRL 1573; Graham et al., J. Gen. Virol. 36:59-72, 1977), BHK-570 cells (ATCC CRL 10314), CHO-K1 (ATCC CCL 61), CHO-S (Invitrogen 11619-012), and 293-F (Invitrogen R790-7). A tk ts13 BHK cell line is also available from the ATCC under accession number CRL 1632. In addition, a number of other cell lines may be used within the present invention, including Rat Hep I (Rat hepatoma; ATCC CRL 1600), Rat Hep II (Rat hepatoma; ATCC CRL 1548), TCMK (ATCC CCL 139), Human lung (ATCC HB 8065), NCTC 1469 (ATCC CCL 9.1), CHO (ATCC CCL 61) and DUKX cells (Urlaub and Chasin, Proc. Natl. Acad. Sci. USA 77:4216-4220, 1980).

[0293] Examples of suitable yeasts cells include cells of Saccharomyces spp. or Schizosaccharomyces spp., in particular strains of Saccharomyces cerevisiae or Saccharomyces kluyveri. Methods for transforming yeast cells with heterologous DNA and producing heterologous polypeptides there from are described, e.g. in U.S. Pat. No. 4,599,311, U.S. Pat. No. 4,931,373, U.S. Pat. Nos. 4,870,008, 5,037,743, and U.S. Pat. No. 4,845,075, all of which are hereby incorporated by reference. Transformed cells are selected by a phenotype determined by a selectable marker, commonly drug resistance or the ability to grow in the absence of a particular nutrient, e.g. leucine. A preferred vector for use in yeast is the POT1 vector disclosed in U.S. Pat. No. 4,931,373. The DNA sequences encoding the BFXTEN may be preceded by a signal sequence and optionally a leader sequence, e.g. as described above. Further examples of suitable yeast cells are strains of Kluyveromyces, such as K. lactis, Hansenula, e.g. H. polymorpha, or Pichia, e.g. P. pastoris (cf. Gleeson et al., J. Gen. Microbiol. 132, 1986, pp. 3459-3465; U.S. Pat. No. 4,882,279). Examples of other fungal cells are cells of filamentous fungi, e.g. Aspergillus spp., Neurospora spp., Fusarium spp. or Trichoderma spp., in particular strains of A. oryzae, A. nidulans or A. niger. The use of Aspergillus spp. for the expression of proteins is described in, e.g., EP 272 277, EP 238 023, EP 184 438 The transformation of F. oxysporum may, for instance, be carried out as described by Malardier et al., 1989, Gene 78: 147-156. The transformation of Trichoderma spp. may be performed for instance as described in EP 244 234.

[0294] Other suitable cells that can be used in the present invention include, but are not limited to, prokaryotic host cells strains such as Escherichia coli, (e.g., strain DH5-α), Bacillus subtilis, Salmonella typhimurium, or strains of the genera of Pseudomonas, Streptomyces and Staphylococcus. Non-limiting examples of suitable prokaryotes include those from the genera: Actinoplanes; Archaeoglobus; Bdellovibrio; Borrelia; Chloroflexus; Enterococcus; Escherichia; Lactobacillus; Listeria; Oceanobacillus; Paracoccus; Pseudomonas; Staphylococcus; Streptococcus; Streptomyces; Thermoplasma; and Vibrio. Non-limiting examples of specific strains include: Archaeoglobus fulgidus; Bdellovibrio bacteriovorus; Borrelia burgdorferi; Chloroflexus aurantiacus; Enterococcus faecalis; Enterococcus faecium; Lactobacillus johnsonii; Lactobacillus plantarum; Lactococcus lactis; Listeria innocua; Listeria monocytogenes; Oceanobacillus iheyensis; Paracoccus zeaxanthinifaciens; Pseudomonas mevalonii; Staphylococcus aureus; Staphylococcus epidermidis; Staphylococcus haemolyticus; Streptococcus agalactiae; Streptomyces griseolosporeus; Streptococcus mutans; Streptococcus pneumoniae; Streptococcus pyogenes; Thermoplasma acidophilum; Thermoplasma volcanium; Vibrio cholerae; Vibrio parahaemolyticus; and Vibrio vulnificus.

[0295] Host cells containing the polynucleotides of interest can be cultured in conventional nutrient media (e.g., Ham's nutrient mixture) modified as appropriate for activating promoters, selecting transformants or amplifying genes. The culture conditions, such as temperature, pH and the like, are those previously used with the host cell selected for expression, and will be apparent to the ordinarily skilled artisan. Cells are typically harvested by centrifugation, disrupted by physical or chemical means, and the resulting crude extract retained for further purification. For compositions secreted by the host cells, supernatant from centrifugation is separated and retained for further purification. Microbial cells employed in expression of proteins can be disrupted by any convenient method, including freeze-thaw cycling, sonication, mechanical disruption, or use of cell lysing agents, all of which are well known to those skilled in the art. Embodiments that involve cell lysis may entail use of a buffer that contains protease inhibitors that limit degradation after expression of the chimeric DNA molecule. Suitable protease inhibitors include, but are not limited to leupeptin, pepstatin or aprotinin The supernatant then may be precipitated in successively increasing concentrations of saturated ammonium sulfate.

[0296] Gene expression may be measured in a sample directly, for example, by conventional Southern blotting, Northern blotting to quantitate the transcription of mRNA [Thomas, Proc. Natl. Acad. Sci. USA, 77:5201-5205 (1980)], dot blotting (DNA analysis), or in situ hybridization, using an appropriately labeled probe, based on the sequences provided herein. Alternatively, antibodies may be employed that can recognize specific duplexes, including DNA duplexes, RNA duplexes, and DNA-RNA hybrid duplexes or DNA-protein duplexes. The antibodies in turn may be labeled and the assay may be carried out where the duplex is bound to a surface, so that upon the formation of duplex on the surface, the presence of antibody bound to the duplex can be detected.

[0297] Gene expression, alternatively, may be measured by immunological of fluorescent methods, such as immunohistochemical staining of cells or tissue sections and assay of cell culture or body fluids or the detection of selectable markers, to quantitate directly the expression of gene product. Antibodies useful for immunohistochemical staining and/or assay of sample fluids may be either monoclonal or polyclonal, and may be prepared in any mammal. Conveniently, the antibodies may be prepared against a native sequence BP polypeptide or against a synthetic peptide based on the DNA sequences provided herein or against exogenous sequence fused to BF and encoding a specific antibody epitope. Examples of selectable markers are well known to one of skill in the art and include reporters such as enhanced green fluorescent protein (EGFP), beta-galactosidase (β-gal) or chloramphenicol acetyltransferase (CAT).

[0298] Expressed BFXTEN polypeptide product(s) may be purified via methods known in the art or by methods disclosed herein. Procedures such as gel filtration, affinity purification, salt fractionation, ion exchange chromatography, size exclusion chromatography, hydroxyapatite adsorption chromatography, hydrophobic interaction chromatography and gel electrophoresis may be used; each tailored to recover and purify the fusion protein produced by the respective host cells. Some expressed BFXTEN may require refolding during isolation and purification. Methods of purification are described in Robert K. Scopes, Protein Purification: Principles and Practice, Charles R. Castor (ed.), Springer-Verlag 1994, and Sambrook, et al., supra. Multi-step purification separations are also described in Baron, et al., Crit. Rev. Biotechnol. 10:179-90 (1990) and Below, et al., J. Chromatogr. A. 679:67-83 (1994).

### VII). Pharmaceutical Compositions

[0299] The present invention provides pharmaceutical compositions comprising BFXTEN. In one embodiment, the pharmaceutical composition comprises the BFXTEN fusion protein or, in the case of a combination BXTEN, the first and second fusion proteins, and at least one pharmaceutically acceptable carrier. BFXTEN polypeptides of the present invention can be formulated according to known methods to prepare pharmaceutically useful compositions, whereby the polypeptide is combined in admixture with a pharmaceutically acceptable carrier vehicle, such as sterile or aqueous solutions, pharmaceutically acceptable suspensions and emulsions. Examples of non-aqueous solvents include propyl ethylene glycol, polyethylene glycol and vegetable oils. Therapeutic formulations are prepared for storage by mixing the active ingredient having the desired degree of purity with optional physiologically acceptable carriers, excipients or stabilizers, as described in Remington's Pharmaceutical Sciences 16th edition, Osol, A. Ed. (1980), in the form of lyophilized formulations or aqueous solutions.

[0300] The pharmaceutical compositions can be administered orally, intranasally, parenterally or by inhalation therapy, and may take the form of tablets, lozenges, granules, capsules, pills, ampoules, suppositories or aerosol form. They may also take the form of suspensions, solutions and emulsions of the active ingredient in aqueous or nonaqueous diluents, syrups, granulates or powders. In addition, the pharmaceutical compositions can also contain other pharmaceutically active compounds or a plurality of compounds of the invention.

[0301] More particularly, the present pharmaceutical compositions may be administered for therapy by any suitable route including oral, rectal, nasal, topical (including transdermal, aerosol, buccal and sublingual), vaginal, parenteral (including subcutaneous, subcutaneous by infusion pump, intramuscular, intravenous and intradermal), intravitreal, and pulmonary. It will also be appreciated that the preferred route will vary with the condition and age of the recipient, and the disease being treated.

[0302] In one embodiment, the pharmaceutical composition is administered subcutaneously. In this embodiment, the composition may be supplied as a lyophilized powder to be reconstituted prior to administration. The composition may also be supplied in a liquid form, which can be administered directly to a patient. In one embodiment, the composition is supplied as a liquid in a pre-filled syringe such that a patient can easily self-administer the composition.

[0303] Extended release formulations useful in the present invention may be oral formulations comprising a matrix and a coating composition. Suitable matrix materials may include waxes (e.g., carnauba, bees wax, paraffin wax, ceresine, shellac wax, fatty acids, and fatty alcohols), oils, hardened oils or fats (e.g., hardened rapeseed oil, castor oil, beef tallow, palm oil, and soya bean oil), and polymers (e.g., hydroxypropyl cellulose, polyvinylpyrrolidone, hydroxypropyl methyl cellulose, and polyethylene glycol). Other suitable matrix tabletting materials are microcrystalline cellulose, powdered cellulose, hydroxypropyl cellulose, ethyl cellulose, with other carriers, and fillers. Tablets may also contain granulates, coated powders, or pellets. Tablets may also be multi-layered. Multi-layered tablets are especially preferred when the active ingredients have markedly different pharmacokinetic profiles. Optionally, the finished tablet may be coated or uncoated.

[0304] The coating composition may comprise an insoluble matrix polymer and/or a water soluble material. Water soluble materials can be polymers such as polyethylene glycol, hydroxypropyl cellulose, hydroxypropyl methyl cellulose, polyvinylpyrrolidone, polyvinyl alcohol, or monomeric materials such as sugars (e.g., lactose, sucrose, fructose, mannitol and the like), salts (e.g., sodium chloride, potassium chloride and the like), organic acids (e.g., fumaric acid, succinic acid, lactic acid, and tartaric acid), and mixtures thereof. Optionally, an enteric polymer may be incorporated into the coating composition. Suitable enteric polymers include hydroxypropyl methyl cellulose, acetate succinate, hydroxypropyl methyl cellulose, phthalate, polyvinyl acetate phthalate, cellulose acetate phthalate, cellulose acetate trimellitate, shellac, zein, and polymethacrylates containing carboxyl groups. The coating composition may be plasticised by adding suitable plasticisers such as, for example, diethyl phthalate, citrate esters, polyethylene glycol, glycerol, acetylated glycerides, acetylated citrate esters, dibutylsebacate, and castor oil. The coating composition may also include a filler, which can be an insoluble material such as silicon dioxide, titanium dioxide, talc, kaolin, alumina, starch, powdered cellulose, MCC, or polacrilin potassium. The coating composition may be applied as a solution or latex in organic solvents or aqueous solvents or mixtures thereof. Solvents such as water, lower alcohol, lower chlorinated hydrocarbons, ketones, or mixtures thereof may be used.

[0305] The compositions of the invention may be formulated using a variety of excipients. Suitable excipients include microcrystalline cellulose (e.g. Avicel PH102, Avicel PH101), polymethacrylate, poly(ethyl acrylate, methyl methacrylate, trimethylammonioethyl methacrylate chloride) (such as Eudragit RS-30D), hydroxypropyl methylcellulose (Methocel K100M, Premium CR Methocel K100M, Methocel E5, Opadry®), magnesium stearate, talc, triethyl citrate, aqueous ethylcellulose dispersion (Surelease®), and protamine sulfate. The slow release agent may also comprise a carrier, which can comprise, for example, solvents, dispersion media, coatings, antibacterial and antifungal agents, isotonic and absorption delaying agents. Pharmaceutically acceptable salts can also be used in these slow release agents, for example, mineral salts such as hydrochlorides, hydrobromides, phosphates, or sulfates, as well as the salts of organic acids such as acetates, propionates, malonates, or benzoates. The composition may also contain liquids, such as water, saline, glycerol, and ethanol, as well as substances such as wetting agents, emulsifying agents, or pH buffering agents. Liposomes may also be used as a carrier.

[0306] In another embodiment, the compositions of the present invention are encapsulated in liposomes, which have demonstrated utility in delivering beneficial active agents in a controlled manner over prolonged periods of time. Liposomes are closed bilayer membranes containing an entrapped aqueous volume. Liposomes may also be unilamellar vesicles possessing a single membrane bilayer or multilamellar vesicles with multiple membrane bilayers, each separated from the next by an aqueous layer. The structure of the resulting membrane bilayer is such that the hydrophobic (non-polar) tails of the lipid are oriented toward the center of the bilayer while the hydrophilic (polar) heads orient towards the aqueous phase. In one embodiment, the liposome may be coated with a flexible water soluble polymer that avoids uptake by the organs of the mononuclear phagocyte system, primarily the liver and spleen. Suitable hydrophilic polymers for surrounding the liposomes include, without limitation, PEG, polyvinylpyrrolidone, polyvinylmethylether, polymethyloxazoline, polyethyloxazoline, polyhydroxypropyloxazoline, polyhydroxypropylmethacrylamide, polymethacrylamide, polydimethylacrylamide, polyhydroxypropylmethacrylate, polyhydroxyethylacrylate, hydroxymethylcellulose hydroxyethylcellulose, polyethyleneglycol, polyaspartamide and hydrophilic peptide sequences as described in U.S. Pat. Nos. 6,316,024; 6,126,966; 6,056,973; 6,043,094, the contents of which are incorporated by reference in their entirety.

[0307] Liposomes may be comprised of any lipid or lipid combination known in the art. For example, the vesicle-forming lipids may be naturally-occurring or synthetic lipids, including phospholipids, such as phosphatidylcholine, phosphatidylethanolamine, phosphatidic acid, phosphatidylserine, phasphatidylglycerol, phosphatidylinositol, and sphingomyelin as disclosed in U.S. Pat. Nos. 6,056,973 and 5,874,104. The vesicle-forming lipids may also be glycolipids, cerebrosides, or cationic lipids, such as 1,2-dioleyloxy-3-(trimethylamino) propane (DOTAP); N-[1-(2,3,-ditetradecyloxy)propyl]-N,N-dimethyl-N-hydroxyethylammonium bromide (DMRIE); N-[1[(2,3,-dioleyloxy)propyl]-N,N-dimethyl-N-hydroxy ethylammonium bromide (DORIE); N-[1-(2,3-dioleyloxy)propyl]-N,N,N-trimethylammonium chloride (DOTMA); 3 [N—(N′,N′-dimethylaminoethane) carbamoly]cholesterol (DC-Chol); or dimethyldioctadecylammonium (DDAB) also as disclosed in U.S. Pat. No. 6,056,973. Cholesterol may also be present in the proper range to impart stability to the vesicle as disclosed in U.S. Pat. Nos. 5,916,588 and 5,874,104.

[0308] Additional liposomal technologies are described in U.S. Pat. Nos. 6,759,057; 6,406,713; 6,352,716; 6,316,024; 6,294,191; 6,126,966; 6,056,973; 6,043,094; 5,965,156; 5,916,588; 5,874,104; 5,215,680; and 4,684,479, the contents of which are incorporated herein by reference. These describe liposomes and lipid-coated microbubbles, and methods for their manufacture. Thus, one skilled in the art, considering both the disclosure of this invention and the disclosures of these other patents could produce a liposome for the extended release of the polypeptides of the present invention.

[0309] For liquid formulations, a desired property is that the formulation be supplied in a form that can pass through a 25, 28, 30, 31, 32 gauge needle for intravenous, intramuscular, intraarticular, or subcutaneous administration.

[0310] Administration via transdermal formulations can be performed using methods also known in the art, including those described generally in, e.g., U.S. Pat. Nos. 5,186,938 and 6,183,770, 4,861,800, 6,743,211, 6,945,952, 4,284,444, and WO 89/09051, incorporated herein by reference in their entireties. A transdermal patch is a particularly useful embodiment with polypeptides having absorption problems. Patches can be made to control the release of skin-permeable active ingredients over a 12 hour, 24 hour, 3 day, and 7 day period. In one example, a 2-fold daily excess of a polypeptide of the present invention is placed in a non-volatile fluid. The compositions of the invention are provided in the form of a viscous, non-volatile liquid. The penetration through skin of specific formulations may be measures by standard methods in the art (for example, Franz et al., J. Invest. Derm. 64:194-195 (1975)). Examples of suitable patches are passive transfer skin patches, iontophoretic skin patches, or patches with microneedles such as Nicoderm.

[0311] In other embodiments, the composition may be delivered via intranasal, buccal, or sublingual routes to the brain to enable transfer of the active agents through the olfactory passages into the CNS and reducing the systemic administration. Devices commonly used for this route of administration are included in U.S. Pat. No. 6,715,485. Compositions delivered via this route may enable increased CNS dosing or reduced total body burden reducing systemic toxicity risks associated with certain drugs. Preparation of a pharmaceutical composition for delivery in a subdermally implantable device can be performed using methods known in the art, such as those described in, e.g., U.S. Pat. Nos. 3,992,518; 5,660,848; and 5,756,115.

[0312] Osmotic pumps may be used as slow release agents in the form of tablets, pills, capsules or implantable devices. Osmotic pumps are well known in the art and readily available to one of ordinary skill in the art from companies experienced in providing osmotic pumps for extended release drug delivery. Examples are ALZA's DUROS™; ALZA's OROS™; Osmotica Pharmaceutical's Osmodex™ system; Shire Laboratories' EnSoTrol™ system; and Alzet™. Patents that describe osmotic pump technology are U.S. Pat. Nos. 6,890,918; 6,838,093; 6,814,979; 6,713,086; 6,534,090; 6,514,532; 6,361,796; 6,352,721; 6,294,201; 6,284,276; 6,110,498; 5,573,776; 4,200,0984; and 4,088,864, the contents of which are incorporated herein by reference. One skilled in the art, considering both the disclosure of this invention and the disclosures of these other patents could produce an osmotic pump for the extended release of the polypeptides of the present invention.

[0313] Syringe pumps may also be used as slow release agents. Such devices are described in U.S. Pat. Nos. 4,976,696; 4,933,185; 5,017,378; 6,309,370; 6,254,573; 4,435,173; 4,398,908; 6,572,585; 5,298,022; 5,176,502; 5,492,534; 5,318,540; and 4,988,337, the contents of which are incorporated herein by reference. One skilled in the art, considering both the disclosure of this invention and the disclosures of these other patents could produce a syringe pump for the extended release of the compositions of the present invention.

### VII). Pharmaceutical Kits

[0314] In another aspect, the invention provides a kit to facilitate the use of the BFXTEN polypeptides. The kit comprises the pharmaceutical composition provided herein, a label identifying the pharmaceutical composition, and an instruction for storage, reconstitution and/or administration of the pharmaceutical compositions to a subject. In some embodiment, the kit comprises, preferably: (a) an amount of a BFXTEN fusion protein composition sufficient to treat a disease, condition or disorder upon administration to a subject in need thereof; and (b) an amount of a pharmaceutically acceptable carrier; together in a formulation ready for injection or for reconstitution with sterile water, buffer, or dextrose; together with a label identifying the BFXTEN drug and storage and handling conditions, and a sheet of the approved indications for the drug, instructions for the reconstitution and/or administration of the BFXTEN drug for the use for the prevention and/or treatment of a approved indication, appropriate dosage and safety information, and information identifying the lot and expiration of the drug. In another embodiment of the foregoing, the kit can comprise a second container that can carry a suitable diluent for the BFXTEN composition, the use of which will provide the user with the appropriate concentration of BFXTEN to be delivered to the subject.

### EXAMPLES

### Example 1

### Construction of XTEN_AD36 Motif Segments

[0315] The following example describes the construction of a collection of codon-optimized genes encoding motif sequences of 36 amino acids. As a first step, a stuffer vector pCW0359 was constructed based on a pET vector and that includes a T7 promoter. pCW0359 encodes a cellulose binding domain (CBD) and a TEV protease recognition site followed by a stuffer sequence that is flanked by BsaI, BbsI, and KpnI sites. The BsaI and BbsI sites were inserted such that they generate compatible overhangs after digestion. The stuffer sequence is followed by a truncated version of the GFP gene and a His tag. The stuffer sequence contains stop codons and thus E. coli cells carrying the stuffer plasmid pCW0359 form non-fluorescent colonies. The stuffer vector pCW0359 was digested with BsaI and KpnI to remove the stuffer segment and the resulting vector fragment was isolated by agarose gel purification. The sequences were designated XTEN_AD36, reflecting the AD family of motifs. Its segments have the amino acid sequence [X]₃ where X is a 12mer peptide with the sequences: GESPGGSSGSES (SEQ ID NO: 184), GSEGSSGPGESS (SEQ ID NO: 185), GSSESGSSEGGP (SEQ ID NO: 186), or GSGGEPSESGSS (SEQ ID NO: 187). The insert was obtained by annealing the following pairs of phosphorylated synthetic oligonucleotide pairs:

(SEQ ID NO: 188)
AD1for: AGGTGAATCTCCDGGTGGYTCYAGCGGTTCYGARTC
(SEQ ID NO: 189)
AD1rev: ACCTGAYTCRGAACCGCTRGARCCACCHGGAGATTC
(SEQ ID NO: 190)
AD2for: AGGTAGCGAAGGTTCTTCYGGTCCDGGYGARTCYTC
(SEQ ID NO: 191)
AD2rev: ACCTGARGAYTCRCCHGGACCRGAAGAACCTTCGCT
(SEQ ID NO: 192)
AD3for: AGGTTCYTCYGAAAGCGGTTCTTCYGARGGYGGTCC
(SEQ ID NO: 193)
AD3rev: ACCTGGACCRCCYTCRGAAGAACCGCTTTCRGARGA
(SEQ ID NO: 194)
AD4for: AGGTTCYGGTGGYGAACCDTCYGARTCTGGTAGCTC

[0316] We also annealed the phosphorylated oligonucleotide 3KpnIstopperFor: AGGTTCGTCTTCACTCGAGGGTAC (SEQ ID NO: 195) and the non-phosphorylated oligonucleotide pr_{—}3KpnIstopperRev: CCTCGAGTGAAGACGA (SEQ ID NO: 196). The annealed oligonucleotide pairs were ligated, which resulted in a mixture of products with varying length that represents the varying number of 12mer repeats ligated to one BbsI/KpnI segment. The products corresponding to the length of 36 amino acids were isolated from the mixture by preparative agarose gel electrophoresis and ligated into the BsaI/KpnI digested stuffer vector pCW0359. Most of the clones in the resulting library designated LCW0401 showed green fluorescence after induction, which shows that the sequence of XTEN_AD36 had been ligated in frame with the GFP gene and that most sequences of XTEN_AD36 had good expression levels.

[0317] We screened 96 isolates from library LCW0401 for high level of fluorescence by stamping them onto agar plate containing IPTG. The same isolates were evaluated by PCR and 48 isolates were identified that contained segments with 36 amino acids as well as strong fluorescence. These isolates were sequenced and 39 clones were identified that contained correct XTEN_AD36 segments. Nucleotide and amino acid sequences for these segments are listed in Table 9.

TABLE 9
DNA and Amino Acid Sequences for 36-mer motifs

| | | SEQ | | SEQ |
|---|---|---|---|---|
| | | ID | | ID |
| File name | Amino acid sequence | NO: | Nucleotide sequence | NO: |
| LCW0401_001_{—} | GSGGEPSESGSSGESPG | 197 | GGTTCTGGTGGCGAACCGTCCGAGTCTGGTAG | 235 |
| GFP-N_A01.ab1 | GSSGSESGESPGGSSGS | | CTCAGGTGAATCTCCGGGTGGCTCTAGCGGTT | |
| | ES | | CCGAGTCAGGTGAATCTCCTGGTGGTTCCAGC | |
| | | | GGTTCCGAGTCA | |
| LCW0401_002_{—} | GSEGSSGPGESSGESPG | 198 | GGTAGCGAAGGTTCTTCTGGTCCTGGCGAGTC | 236 |
| GFP-N_B01.ab1 | GSSGSESGSSESGSSEG | | TTCAGGTGAATCTCCTGGTGGTTCCAGCGGTT | |
| | GP | | CTGAATCAGGTTCCTCCGAAAGCGGTTCTTCC | |
| | | | GAGGGCGGTCCA | |
| LCW0401_003_{—} | GSSESGSSEGGPGSSES | 199 | GGTTCCTCTGAAAGCGGTTCTTCCGAAGGTGG | 237 |
| GFP-N_C01.ab1 | GSSEGGPGESPGGSSGS | | TCCAGGTTCCTCTGAAAGCGGTTCTTCTGAGG | |
| | ES | | GTGGTCCAGGTGAATCTCCGGGTGGCTCCAGC | |
| | | | GGTTCCGAGTCA | |
| LCW0401_004_{—} | GSGGEPSESGSSGSSES | 200 | GGTTCCGGTGGCGAACCGTCTGAATCTGGTAG | 238 |
| GFP-N_D01.ab1 | GSSEGGPGSGGEPSESG | | CTCAGGTTCTTCTGAAAGCGGTTCTTCCGAGG | |
| | SS | | GTGGTCCAGGTTCTGGTGGTGAACCTTCCGAG | |
| | | | TCTGGTAGCTCA | |
| LCW0401_007_{—} | GSSESGSSEGGPGSEGS | 201 | GGTTCTTCCGAAAGCGGTTCTTCTGAGGGTGG | 239 |
| GFP-N_F01.ab1 | SGPGESSGSEGSSGPGE | | TCCAGGTAGCGAAGGTTCTTCCGGTCCAGGTG | |
| | SS | | AGTCTTCAGGTAGCGAAGGTTCTTCTGGTCCT | |
| | | | GGTGAATCTTCA | |
| LCW0401_ 008_{—} | GSSESGSSEGGPGESPG | 202 | GGTTCCTCTGAAAGCGGTTCTTCCGAGGGTGG | 240 |
| GFP-N_G01.ab1 | GSSGSESGSEGSSGPGE | | TCCAGGTGAATCTCCAGGTGGTTCCAGCGGTT | |
| | SS | | CTGAGTCAGGTAGCGAAGGTTCTTCTGGTCCA | |
| | | | GGTGAATCCTCA | |
| LCW0401_012_{—} | GSGGEPSESGSSGSGGE | 203 | GGTTCTGGTGGTGAACCGTCTGAGTCTGGTAG | 241 |
| GFP-N_H01.ab1 | PSESGSSGSEGSSGPGE | | CTCAGGTTCCGGTGGCGAACCATCCGAATCTG | |
| | SS | | GTAGCTCAGGTAGCGAAGGTTCTTCCGGTCCA | |
| | | | GGTGAGTCTTCA | |
| LCW0401_015_{—} | GSSESGSSEGGPGSEGS | 204 | GGTTCTTCCGAAAGCGGTTCTTCCGAAGGCGG | 242 |
| GFP-N_A02.ab1 | SGPGESSGESPGGSSGS | | TCCAGGTAGCGAAGGTTCTTCTGGTCCAGGCG | |
| | ES | | AATCTTCAGGTGAATCTCCTGGTGGCTCCAGC | |
| | | | GGTTCTGAGTCA | |
| LCW0401_016_{—} | GSSESGSSEGGPGSSES | 205 | GGTTCCTCCGAAAGCGGTTCTTCTGAGGGCGG | 243 |
| GFP-N_B02.ab1 | GSSEGGPGSSESGSSEG | | TCCAGGTTCCTCCGAAAGCGGTTCTTCCGAGG | |
| | GP | | GCGGTCCAGGTTCTTCTGAAAGCGGTTCTTCC | |
| | | | GAGGGCGGTCCA | |
| LCW0401_020__ | GSGGEPSESGSSGSEGS | 206 | GGTTCCGGTGGCGAACCGTCCGAATCTGGTAG | 244 |
| GFP-N_E02.ab1 | SGPGESSGSSESGSSEG | | CTCAGGTAGCGAAGGTTCTTCTGGTCCAGGCG | |
| | GP | | AATCTTCAGGTTCCTCTGAAAGCGGTTCTTCT | |
| | | | GAGGGCGGTCCA | |
| LCW0401_022_{—} | GSGGEPSESGSSGSSES | 207 | GGTTCTGGTGGTGAACCGTCCGAATCTGGTAG | 245 |
| GFP-N_F02.ab1 | GSSEGGPGSGGEPSESG | | CTCAGGTTCTTCCGAAAGCGGTTCTTCTGAAG | |
| | SS | | GTGGTCCAGGTTCCGGTGGCGAACCTTCTGAA | |
| | | | TCTGGTAGCTCA | |
| LCW0401_024_{—} | GSGGEPSESGSSGSSES | 208 | GGTTCTGGTGGCGAACCGTCCGAATCTGGTAG | 246 |
| GFP-N_G02.ab1 | GSSEGGPGESPGGSSGS | | CTCAGGTTCCTCCGAAAGCGGTTCTTCTGAAG | |
| | ES | | GTGGTCCAGGTGAATCTCCAGGTGGTTCTAGC | |
| | | | GGTTCTGAATCA | |
| LCW0401_026_{—} | GSGGEPSESGSSGESPG | 209 | GGTTCTGGTGGCGAACCGTCTGAGTCTGGTAG | 247 |
| GFP-N_H02.ab1 | GSSGSESGSEGSSGPGE | | CTCAGGTGAATCTCCTGGTGGCTCCAGCGGTT | |
| | SS | | CTGAATCAGGTAGCGAAGGTTCTTCTGGTCCT | |
| | | | GGTGAATCTTCA | |
| LCW0401_027_{—} | GSGGEPSESGSSGESPG | 210 | GGTTCCGGTGGCGAACCTTCCGAATCTGGTAG | 248 |
| GFP-N_A03.ab1 | GSSGSESGSGGEPSESG | | CTCAGGTGAATCTCCGGGTGGTTCTAGCGGTT | |
| | SS | | CTGAGTCAGGTTCTGGTGGTGAACCTTCCGAG | |
| | | | TCTGGTAGCTCA | |
| LCW0401_028_{—} | GSSESGSSEGGPGSSES | 211 | GGTTCCTCTGAAAGCGGTTCTTCTGAGGGCGG | 249 |
| GFP-N_B03.ab1 | GSSEGGPGSSESGSSEG | | TCCAGGTTCTTCCGAAAGCGGTTCTTCCGAGG | |
| | GP | | GCGGTCCAGGTTCTTCCGAAAGCGGTTCTTCT | |
| | | | GAAGGCGGTCCA | |
| LCW0401_030_{—} | GESPGGSSGSESGSEGS | 212 | GGTGAATCTCCGGGTGGCTCCAGCGGTTCTGA | 250 |
| GFP-N_CO3.ab1 | SGPGESSGSEGSSGPGE | | GTCAGGTAGCGAAGGTTCTTCCGGTCCGGGTG | |
| | SS | | AGTCCTCAGGTAGCGAAGGTTCTTCCGGTCCT | |
| | | | GGTGAGTCTTCA | |
| LCW0401_ 031_{—} | GSGGEPSESGSSGSGGE | 213 | GGTTCTGGTGGCGAACCTTCCGAATCTGGTAG | 251 |
| GFP-N_D03.ab1 | PSESGSSGSSESGSSEG | | CTCAGGTTCCGGTGGTGAACCTTCTGAATCTG | |
| | GP | | GTAGCTCAGGTTCTTCTGAAAGCGGTTCTTCC | |
| | | | GAGGGCGGTCCA | |
| LCW0401_ 033_{—} | GSGGEPSESGSSGSGGE | 214 | GGTTCCGGTGGTGAACCTTCTGAATCTGGTAG | 252 |
| GFP-N_E03.ab1 | PSESGSSGSGGEPSESG | | CTCAGGTTCCGGTGGCGAACCATCCGAGTCTG | |
| | SS | | GTAGCTCAGGTTCCGGTGGTGAACCATCCGAG | |
| | | | TCTGGTAGCTCA | |
| LCW0401_037_{—} | GSGGEPSESGSSGSSES | 215 | GGTTCCGGTGGCGAACCTTCTGAATCTGGTAG | 253 |
| GFP-N_F03.ab1 | GSSEGGPGSEGSSGPGE | | CTCAGGTTCCTCCGAAAGCGGTTCTTCTGAGG | |
| | SS | | GCGGTCCAGGTAGCGAAGGTTCTTCTGGTCCG | |
| | | | GGCGAGTCTTCA | |
| LCW0401_038_{—} | GSGGEPSESGSSGSEGS | 216 | GGTTCCGGTGGTGAACCGTCCGAGTCTGGTAG | 254 |
| GFP-N_G03.ab1 | SGPGESSGSGGEPSESG | | CTCAGGTAGCGAAGGTTCTTCTGGTCCGGGTG | |
| | SS | | AGTCTTCAGGTTCTGGTGGCGAACCGTCCGAA | |
| | | | TCTGGTAGCTCA | |
| LCW0401_039_{—} | GSGGEPSESGSSGESPG | 217 | GGTTCTGGTGGCGAACCGTCCGAATCTGGTAG | 255 |
| GFP-N_H03.ab1 | GSSGSESGSGGEPSESG | | CTCAGGTGAATCTCCTGGTGGTTCCAGCGGTT | |
| | SS | | CCGAGTCAGGTTCTGGTGGCGAACCTTCCGAA | |
| | | | TCTGGTAGCTCA | |
| LCW0401_040_{—} | GSSESGSSEGGPGSGGE | 218 | GGTTCTTCCGAAAGCGGTTCTTCCGAGGGCGG | 256 |
| GFP-N_A04.ab1 | PSESGSSGSSESGSSEG | | TCCAGGTTCCGGTGGTGAACCATCTGAATCTG | |
| | GP | | GTAGCTCAGGTTCTTCTGAAAGCGGTTCTTCT | |
| | | | GAAGGTGGTCCA | |
| LCW0401_042_{—} | GSEGSSGPGESSGESPG | 219 | GGTAGCGAAGGTTCTTCCGGTCCTGGTGAGTC | 257 |
| GFP-N_C04.ab1 | GSSGSESGSEGSSGPGE | | TTCAGGTGAATCTCCAGGTGGCTCTAGCGGTT | |
| | SS | | CCGAGTCAGGTAGCGAAGGTTCTTCTGGTCCT | |
| | | | GGCGAGTCCTCA | |
| LCW0401_046_{—} | GSSESGSSEGGPGSSES | 220 | GGTTCCTCTGAAAGCGGTTCTTCCGAAGGCGG | 258 |
| GFP-N_D04.ab1 | GSSEGGPGSSESGSSEG | | TCCAGGTTCTTCCGAAAGCGGTTCTTCTGAGG | |
| | GP | | GCGGTCCAGGTTCCTCCGAAAGCGGTTCTTCT | |
| | | | GAGGGTGGTCCA | |
| LCW0401_047_{—} | GSGGEPSESGSSGESPG | 221 | GGTTCTGGTGGCGAACCTTCCGAGTCTGGTAG | 259 |
| GFP-N_E04.ab1 | GSSGSESGESPGGSSGS | | CTCAGGTGAATCTCCGGGTGGTTCTAGCGGTT | |
| | ES | | CCGAGTCAGGTGAATCTCCGGGTGGTTCCAGC | |
| | | | GGTTCTGAGTCA | |
| LCW0401_051_{—} | GSGGEPSESGSSGSEGS | 222 | GGTTCTGGTGGCGAACCATCTGAGTCTGGTAG | 260 |
| GFP-N_F04.ab1 | SGPGESSGESPGGSSGS | | CTCAGGTAGCGAAGGTTCTTCCGGTCCAGGCG | |
| | ES | | AGTCTTCAGGTGAATCTCCTGGTGGCTCCAGC | |
| | | | GGTTCTGAGTCA | |
| LCW0401_053_{—} | GESPGGSSGSESGESPG | 223 | GGTGAATCTCCTGGTGGTTCCAGCGGTTCCGA | 261 |
| GFP-N_H04.ab1 | GSSGSESGESPGGSSGS | | GTCAGGTGAATCTCCAGGTGGCTCTAGCGGTT | |
| | ES | | CCGAGTCAGGTGAATCTCCTGGTGGTTCTAGC | |
| | | | GGTTCTGAATCA | |
| LCW0401_054_{—} | GSEGSSGPGESSGSEGS | 224 | GGTAGCGAAGGTTCTTCCGGTCCAGGTGAATC | 262 |
| GFP-N_A05.ab1 | SGPGESSGSGGEPSESG | | TTCAGGTAGCGAAGGTTCTTCTGGTCCTGGTG | |
| | SS | | AATCCTCAGGTTCCGGTGGCGAACCATCTGAA | |
| | | | TCTGGTAGCTCA | |
| LCW0401_059_{—} | GSGGEPSESGSSGSEGS | 225 | GGTTCTGGTGGCGAACCATCCGAATCTGGTAG | 263 |
| GFP-N_D05.ab1 | SGPGESSGESPGGSSGS | | CTCAGGTAGCGAAGGTTCTTCTGGTCCTGGCG | |
| | ES | | AATCTTCAGGTGAATCTCCAGGTGGCTCTAGC | |
| | | | GGTTCCGAATCA | |
| LCW0401_060_{—} | GSGGEPSESGSSGSSES | 226 | GGTTCCGGTGGTGAACCGTCCGAATCTGGTAG | 264 |
| GFP-N_E05.ab1 | GSSEGGPGSGGEPSESG | | CTCAGGTTCCTCTGAAAGCGGTTCTTCCGAGG | |
| | SS | | GTGGTCCAGGTTCCGGTGGTGAACCTTCTGAG | |
| | | | TCTGGTAGCTCA | |
| LCW0401_061_{—} | GSSESGSSEGGPGSGGE | 227 | GGTTCCTCTGAAAGCGGTTCTTCTGAGGGCGG | 265 |
| GFP-N_F05.ab1 | PSESGSSGSEGSSGPGE | | TCCAGGTTCTGGTGGCGAACCATCTGAATCTG | |
| | SS | | GTAGCTCAGGTAGCGAAGGTTCTTCCGGTCCG | |
| | | | GGTGAATCTTCA | |
| LCW0401_063_{—} | GSGGEPSESGSSGSEGS | 228 | GGTTCTGGTGGTGAACCGTCCGAATCTGGTAG | 266 |
| GFP-N_H05.ab1 | SGPGESSGSEGSSGPGE | | CTCAGGTAGCGAAGGTTCTTCTGGTCCTGGCG | |
| | SS | | AGTCTTCAGGTAGCGAAGGTTCTTCTGGTCCT | |
| | | | GGTGAATCTTCA | |
| LCW0401_066_{—} | GSGGEPSESGSSGSSES | 229 | GGTTCTGGTGGCGAACCATCCGAGTCTGGTAG | 267 |
| GFP-N_B06.ab1 | GSSEGGPGSGGEPSESG | | CTCAGGTTCTTCCGAAAGCGGTTCTTCCGAAG | |
| | SS | | GCGGTCCAGGTTCTGGTGGTGAACCGTCCGAA | |
| | | | TCTGGTAGCTCA | |
| LCW0401_067_{—} | GSGGEPSESGSSGESPG | 230 | GGTTCCGGTGGCGAACCTTCCGAATCTGGTAG | 268 |
| GFP-N_C06.ab1 | GSSGSESGESPGGSSGS | | CTCAGGTGAATCTCCGGGTGGTTCTAGCGGTT | |
| | ES | | CCGAATCAGGTGAATCTCCAGGTGGTTCTAGC | |
| | | | GGTTCCGAATCA | |
| LCW0401_069_{—} | GSGGEPSESGSSGSGGE | 231 | GGTTCCGGTGGTGAACCATCTGAGTCTGGTAG | 269 |
| GFP-N_D06.ab1 | PSESGSSGESPGGSSGS | | CTCAGGTTCCGGTGGCGAACCGTCCGAGTCTG | |
| | ES | | GTAGCTCAGGTGAATCTCCGGGTGGTTCCAGC | |
| | | | GGTTCCGAATCA | |
| LCW0401_070_{—} | GSEGSSGPGESSGSSES | 232 | GGTAGCGAAGGTTCTTCTGGTCCGGGCGAATC | 270 |
| GFP-N_E06.ab1 | GSSEGGPGSEGSSGPGE | | CTCAGGTTCCTCCGAAAGCGGTTCTTCCGAAG | |
| | SS | | GTGGTCCAGGTAGCGAAGGTTCTTCCGGTCCT | |
| | | | GGTGAATCTTCA | |
| LCW0401_078_{—} | GSSESGSSEGGPGESPG | 233 | GGTTCCTCTGAAAGCGGTTCTTCTGAAGGCGG | 271 |
| GFP-N_F06.ab1 | GSSGSESGESPGGSSGS | | TCCAGGTGAATCTCCGGGTGGCTCCAGCGGTT | |
| | ES | | CTGAATCAGGTGAATCTCCTGGTGGCTCCAGC | |
| | | | GGTTCCGAGTCA | |
| LCW0401_079_{—} | GSEGSSGPGESSGSEGS | 234 | GGTAGCGAAGGTTCTTCTGGTCCAGGCGAGTC | 272 |
| GFP-N_G06.ab1 | SGPGESSGSGGEPSESG | | TTCAGGTAGCGAAGGTTCTTCCGGTCCTGGCG | |
| | SS | | AGTCTTCAGGTTCCGGTGGCGAACCGTCCGAA | |
| | | | TCTGGTAGCTCA | |

### Example 2

### Construction of XTEN_AE36 Segments

[0318] A codon library encoding XTEN sequences of 36 amino acid length was constructed. The XTEN sequence was designated XTEN_AE36. Its segments have the amino acid sequence [X]₃ where X is a 12mer peptide with the sequence: GSPAGSPTSTEE (SEQ ID NO: 273), GSEPATSGSE TP (SEQ ID NO: 274), GTSESA TPESGP (SEQ ID NO: 275), or GTSTEPSEGSAP (SEQ ID NO: 276). The insert was obtained by annealing the following pairs of phosphorylated synthetic oligonucleotide pairs:

(SEQ ID NO: 277)
AE1for: AGGTAGCCCDGCWGGYTCTCCDACYTCYACYGARGA
(SEQ ID NO: 278)
AE1rev: ACCTTCYTCRGTRGARGTHGGAGARCCWGCHGGGCT
(SEQ ID NO: 279)
AE2for: AGGTAGCGAACCKGCWACYTCYGGYTCTGARACYCC
(SEQ ID NO: 280)
AE2rev: ACCTGGRGTYTCAGARCCRGARGTWGCMGGTTCGCT
(SEQ ID NO: 281)
AE3for: AGGTACYTCTGAAAGCGCWACYCCKGARTCYGGYCC
(SEQ ID NO: 282)
AE3rev: ACCTGGRCCRGAYTCMGGRGTWGCGCTTTCAGARGT
(SEQ ID NO: 283)
AE4for: AGGTACYTCTACYGAACCKTCYGARGGYAGCGCWCC
(SEQ ID NO: 284)
AE4rev: ACCTGGWGCGCTRCCYTCRGAMGGTTCRGTAGARGT

[0319] We also annealed the phosphorylated oligonucleotide 3KpnIstopperFor: AGGTTCGTCTTCACTCGAGGGTAC (SEQ ID NO: 285) and the non-phosphorylated oligonucleotide pr_{—}3KpnIstopperRev: CCTCGAGTGAAGACGA (SEQ ID NO: 286). The annealed oligonucleotide pairs were ligated, which resulted in a mixture of products with varying length that represents the varying number of 12mer repeats ligated to one BbsI/KpnI segment. The products corresponding to the length of 36 amino acids were isolated from the mixture by preparative agarose gel electrophoresis and ligated into the BsaI/KpnI digested stuffer vector pCW0359. Most of the clones in the resulting library designated LCW0402 showed green fluorescence after induction which shows that the sequence of XTEN_AE36 had been ligated in frame with the GFP gene and most sequences of XTEN_AE36 show good expression.

[0320] We screened 96 isolates from library LCW0402 for high level of fluorescence by stamping them onto agar plate containing IPTG. The same isolates were evaluated by PCR and 48 isolates were identified that contained segments with 36 amino acids as well as strong fluorescence. These isolates were sequenced and 37 clones were identified that contained correct XTEN_AE36 segments. Nucleotide and amino acid sequences for these segments are listed in Table 10.

TABLE 10
DNA and Amino Acid Sequences for 36-mer motifs

| | | SEQ | | SEQ |
|---|---|---|---|---|
| | | ID | | ID |
| File name | Amino acid sequence | NO: | Nucleotide sequence | NO: |
| LCW0402_002_{—} | GSPAGSPTSTEEGT | 287 | GGTAGCCCGGCAGGCTCTCCGACCTCTACTGAGGA | 324 |
| GFP-N_A07.ab1 | SESATPESGPGTST | | AGGTACTTCTGAAAGCGCAACCCCGGAGTCCGGCC | |
| | EPSEGSAP | | CAGGTACCTCTACCGAACCGTCTGAGGGCAGCGCA | |
| | | | CCA | |
| LCW0402_003_{—} | GTSTEPSEGSAPGT | 288 | GGTACTTCTACCGAACCGTCCGAAGGCAGCGCTCC | 325 |
| GFP-N_B07.ab1 | STEPSEGSAPGTST | | AGGTACCTCTACTGAACCTTCCGAGGGCAGCGCTC | |
| | EPSEGSAP | | CAGGTACCTCTACCGAACCTTCTGAAGGTAGCGCA | |
| | | | CCA | |
| LCW0402_004_{—} | GTSTEPSEGSAPGT | 289 | GGTACCTCTACCGAACCGTCTGAAGGTAGCGCACC | 326 |
| GFP-N_C07.ab1 | SESATPESGPGTSE | | AGGTACCTCTGAAAGCGCAACTCCTGAGTCCGGTC | |
| | SATPESGP | | CAGGTACTTCTGAAAGCGCAACCCCGGAGTCTGGC | |
| | | | CCA | |
| LCW0402_005_{—} | GTSTEPSEGSAPGTS | 290 | GGTACTTCTACTGAACCGTCTGAAGGTAGCGCACC | 327 |
| GFP-N_D07.ab1 | ESATPESGPGTSESA | | AGGTACTTCTGAAAGCGCAACCCCGGAATCCGGCC | |
| | TPESGP | | CAGGTACCTCTGAAAGCGCAACCCCGGAGTCCGGC | |
| | | | CCA | |
| LCW0402_006_{—} | GSEPATSGSETPGT | 291 | GGTAGCGAACCGGCAACCTCCGGCTCTGAAACCCC | 328 |
| GFP-N_E07.ab1 | SESATPESGPGSPA | | AGGTACCTCTGAAAGCGCTACTCCTGAATCCGGCC | |
| | GSPTSTEE | | CAGGTAGCCCGGCAGGTTCTCCGACTTCCACTGAG | |
| | | | GAA | |
| LCW0402_008_{—} | GTSESATPESGPGS | 292 | GGTACTTCTGAAAGCGCAACCCCTGAATCCGGTCC | 329 |
| GFP-N_F07.ab1 | EPATSGSETPGTST | | AGGTAGCGAACCGGCTACTTCTGGCTCTGAGACTC | |
| | EPSEGSAP | | CAGGTACTTCTACCGAACCGTCCGAAGGTAGCGCA | |
| | | | CCA | |
| LCW0402_009_{—} | GSPAGSPTSTEEGS | 293 | GGTAGCCCGGCTGGCTCTCCAACCTCCACTGAGGA | 330 |
| GFP-N_G07.ab1 | PAGSPTSTEEGSEP | | AGGTAGCCCGGCTGGCTCTCCAACCTCCACTGAAG | |
| | ATSGSETP | | AAGGTAGCGAACCGGCTACCTCCGGCTCTGAAACT | |
| | | | CCA | |
| LCW0402_011_{—} | GSPAGSPTSTEEGT | 294 | GGTAGCCCGGCTGGCTCTCCTACCTCTACTGAGGA | 331 |
| GFP-N_A08.ab1 | SESATPESGPGTST | | AGGTACTTCTGAAAGCGCTACTCCTGAGTCTGGTC | |
| | EPSEGSAP | | CAGGTACCTCTACTGAACCGTCCGAAGGTAGCGCT | |
| | | | CCA | |
| LCW0402_012_{—} | GSPAGSPTSTEEGS | 295 | GGTAGCCCTGCTGGCTCTCCGACTTCTACTGAGGA | 332 |
| GFP-N_B08.ab1 | PAGSPTSTEEGTST | | AGGTAGCCCGGCTGGTTCTCCGACTTCTACTGAGG | |
| | EPSEGSAP | | AAGGTACTTCTACCGAACCTTCCGAAGGTAGCGCT | |
| | | | CCA | |
| LCW0402_013_{—} | GTSESATPESGPGT | 296 | GGTACTTCTGAAAGCGCTACTCCGGAGTCCGGTCC | 333 |
| GFP-N_C08.ab1 | STEPSEGSAPGTST | | AGGTACCTCTACCGAACCGTCCGAAGGCAGCGCTC | |
| | EPSEGSAP | | CAGGTACTTCTACTGAACCTTCTGAGGGTAGCGCT | |
| | | | CCA | |
| LCW0402_014_{—} | GTSTEPSEGSAPGS | 297 | GGTACCTCTACCGAACCTTCCGAAGGTAGCGCTCC | 334 |
| GFP-N_D08.ab1 | PAGSPTSTEEGTST | | AGGTAGCCCGGCAGGTTCTCCTACTTCCACTGAGG | |
| | EPSEGSAP | | AAGGTACTTCTACCGAACCTTCTGAGGGTAGCGCA | |
| | | | CCA | |
| LCW0402_015_{—} | GSEPATSGSETPGS | 298 | GGTAGCGAACCGGCTACTTCCGGCTCTGAGACTCC | 335 |
| GFP-N_E08.ab1 | PAGSPTSTEEGTSE | | AGGTAGCCCTGCTGGCTCTCCGACCTCTACCGAAG | |
| | SATPESGP | | AAGGTACCTCTGAAAGCGCTACCCCTGAGTCTGGC | |
| | | | CCA | |
| LCW0402_016_{—} | GTSTEPSEGSAPGT | 299 | GGTACTTCTACCGAACCTTCCGAGGGCAGCGCACC | 336 |
| GFP-N_F08.ab1 | SESATPESGPGTSE | | AGGTACTTCTGAAAGCGCTACCCCTGAGTCCGGCC | |
| | SATPESGP | | CAGGTACTTCTGAAAGCGCTACTCCTGAATCCGGT | |
| | | | CCA | |
| LCW0402_020_{—} | GTSTEPSEGSAPGS | 300 | GGTACTTCTACTGAACCGTCTGAAGGCAGCGCACC | 337 |
| GFP-N_G08.ab1 | EPATSGSETPGSPA | | AGGTAGCGAACCGGCTACTTCCGGTTCTGAAACCC | |
| | GSPTSTEE | | CAGGTAGCCCAGCAGGTTCTCCAACTTCTACTGAA | |
| | | | GAA | |
| LCW0402_023_{—} | GSPAGSPTSTEEGT | 301 | GGTAGCCCTGCTGGCTCTCCAACCTCCACCGAAGA | 338 |
| GFP-N_A09.ab1 | SESATPESGPGSEP | | AGGTACCTCTGAAAGCGCAACCCCTGAATCCGGCC | |
| | ATSGSETP | | CAGGTAGCGAACCGGCAACCTCCGGTTCTGAAACC | |
| | | | CCA | |
| LCW0402_024_{—} | GTSESATPESGPGS | 302 | GGTACTTCTGAAAGCGCTACTCCTGAGTCCGGCCC | 339 |
| GFP-N_B09.ab1 | PAGSPTSTEEGSPA | | AGGTAGCCCGGCTGGCTCTCCGACTTCCACCGAGG | |
| | GSPTSTEE | | AAGGTAGCCCGGCTGGCTCTCCAACTTCTACTGAA | |
| | | | GAA | |
| LCW0402_025_{—} | GTSTEPSEGSAPGT | 303 | GGTACCTCTACTGAACCTTCTGAGGGCAGCGCTCC | 340 |
| GFP-N_C09.ab1 | SESATPESGPGTST | | AGGTACTTCTGAAAGCGCTACCCCGGAGTCCGGTC | |
| | EPSEGSAP | | CAGGTACTTCTACTGAACCGTCCGAAGGTAGCGCA | |
| | | | CCA | |
| LCW0402_026_{—} | GSPAGSPTSTEEGT | 304 | GGTAGCCCGGCAGGCTCTCCGACTTCCACCGAGGA | 341 |
| GFP-N_D09.ab1 | STEPSEGSAPGSEP | | AGGTACCTCTACTGAACCTTCTGAGGGTAGCGCTC | |
| | ATSGSETP | | CAGGTAGCGAACCGGCAACCTCTGGCTCTGAAACC | |
| | | | CCA | |
| LCW0402_027_{—} | GSPAGSPTSTEEGT | 305 | GGTAGCCCAGCAGGCTCTCCGACTTCCACTGAGGA | 342 |
| GFP-N_E09.ab1 | STEPSEGSAPGTST | | AGGTACTTCTACTGAACCTTCCGAAGGCAGCGCAC | |
| | EPSEGSAP | | CAGGTACCTCTACTGAACCTTCTGAGGGCAGCGCT | |
| | | | CCA | |
| LCW0402_032_{—} | GSEPATSGSETPGT | 306 | GGTAGCGAACCTGCTACCTCCGGTTCTGAAACCCC | 343 |
| GFP-N_H09.ab1 | SESATPESGPGSPA | | AGGTACCTCTGAAAGCGCAACTCCGGAGTCTGGTC | |
| | GSPTSTEE | | CAGGTAGCCCTGCAGGTTCTCCTACCTCCACTGAG | |
| | | | GAA | |
| LCW0402_034_{—} | GTSESATPESGPGT | 307 | GGTACCTCTGAAAGCGCTACTCCGGAGTCTGGCCC | 344 |
| GFP-N_A10.ab1 | STEPSEGSAPGTST | | AGGTACCTCTACTGAACCGTCTGAGGGTAGCGCTC | |
| | EPSEGSAP | | CAGGTACTTCTACTGAACCGTCCGAAGGTAGCGCA | |
| | | | CCA | |
| LCW0402_036_{—} | GSPAGSPTSTEEGT | 308 | GGTAGCCCGGCTGGTTCTCCGACTTCCACCGAGGA | 345 |
| GFP-N_C10.ab1 | STEPSEGSAPGTST | | AGGTACCTCTACTGAACCTTCTGAGGGTAGCGCTC | |
| | EPSEGSAP | | CAGGTACCTCTACTGAACCTTCCGAAGGCAGCGCT | |
| | | | CCA | |
| LCW0402_039_{—} | GTSTEPSEGSAPGT | 309 | GGTACTTCTACCGAACCGTCCGAGGGCAGCGCTCC | 346 |
| GFP-N_E10.ab1 | STEPSEGSAPGTST | | AGGTACTTCTACTGAACCTTCTGAAGGCAGCGCTC | |
| | EPSEGSAP | | CAGGTACTTCTACTGAACCTTCCGAAGGTAGCGCA | |
| | | | CCA | |
| LCW0402_040_{—} | GSEPATSGSETPGT | 310 | GGTAGCGAACCTGCAACCTCTGGCTCTGAAACCCC | 347 |
| GFP-N_F10.ab1 | SESATPESGPGTST | | AGGTACCTCTGAAAGCGCTACTCCTGAATCTGGCC | |
| | EPSEGSAP | | CAGGTACTTCTACTGAACCGTCCGAGGGCAGCGCA | |
| | | | CCA | |
| LCW0402_041_{—} | GTSTEPSEGSAPGS | 311 | GGTACTTCTACCGAACCGTCCGAGGGTAGCGCACC | 348 |
| GFP-N_G10.ab1 | PAGSPTSTEEGTST | | AGGTAGCCCAGCAGGTTCTCCTACCTCCACCGAGG | |
| | EPSEGSAP | | AAGGTACTTCTACCGAACCGTCCGAGGGTAGCGCA | |
| | | | CCA | |
| LCW0402_050_{—} | GSEPATSGSETPGT | 312 | GGTAGCGAACCGGCAACCTCCGGCTCTGAAACTCC | 349 |
| GFP-N_A11.ab1 | SESATPESGPGSEP | | AGGTACTTCTGAAAGCGCTACTCCGGAATCCGGCC | |
| | ATSGSETP | | CAGGTAGCGAACCGGCTACTTCCGGCTCTGAAACC | |
| | | | CCA | |
| LCW0402_051_{—} | GSEPATSGSETPGT | 313 | GGTAGCGAACCGGCAACTTCCGGCTCTGAAACCCC | 350 |
| GFP-N_B11.ab1 | SESATPESGPGSEP | | AGGTACTTCTGAAAGCGCTACTCCTGAGTCTGGCC | |
| | ATSGSETP | | CAGGTAGCGAACCTGCTACCTCTGGCTCTGAAACC | |
| | | | CCA | |
| LCW0402_059__ | GSEPATSGSETPGS | 314 | GGTAGCGAACCGGCAACCTCTGGCTCTGAAACTCC | 351 |
| GFP-N_E11.ab1 | EPATSGSETPGTST | | AGGTAGCGAACCTGCAACCTCCGGCTCTGAAACCC | |
| | EPSEGSAP | | CAGGTACTTCTACTGAACCTTCTGAGGGCAGCGCA | |
| | | | CCA | |
| LCW0402_060_{—} | GTSESATPESGPGS | 315 | GGTACTTCTGAAAGCGCTACCCCGGAATCTGGCCC | 352 |
| GFP-N_F11.ab1 | EPATSGSETPGSEP | | AGGTAGCGAACCGGCTACTTCTGGTTCTGAAACCC | |
| | ATSGSETP | | CAGGTAGCGAACCGGCTACCTCCGGTTCTGAAACT | |
| | | | CCA | |
| LCW0402_061_{—} | GTSTEPSEGSAPGT | 316 | GGTACCTCTACTGAACCTTCCGAAGGCAGCGCTCC | 353 |
| GFP-N_G11.ab1 | STEPSEGSAPGTSE | | AGGTACCTCTACCGAACCGTCCGAGGGCAGCGCAC | |
| | SATPESGP | | CAGGTACTTCTGAAAGCGCAACCCCTGAATCCGGT | |
| | | | CCA | |
| LCW0402_065_{—} | GSEPATSGSETPGT | 317 | GGTAGCGAACCGGCAACCTCTGGCTCTGAAACCCC | 354 |
| GFP-N_A12.ab1 | SESATPESGPGTSE | | AGGTACCTCTGAAAGCGCTACTCCGGAATCTGGTC | |
| | SATPESGP | | CAGGTACTTCTGAAAGCGCTACTCCGGAATCCGGT | |
| | | | CCA | |
| LCW0402_066_{—} | GSEPATSGSETPGS | 318 | GGTAGCGAACCTGCTACCTCCGGCTCTGAAACTCC | 355 |
| GFP-N_B12.ab1 | EPATSGSETPGTST | | AGGTAGCGAACCGGCTACTTCCGGTTCTGAAACTC | |
| | EPSEGSAP | | GCAGTACCTCTACCGAACCTTCCGAAGGCAGCGCA | |
| | | | CCA | |
| LCW0402_067_{—} | GSEPATSGSETPGT | 319 | GGTAGCGAACCTGCTACTTCTGGTTCTGAAACTCC | 356 |
| GFP-N_C12.ab1 | STEPSEGSAPGSEP | | AGGTACTTCTACCGAACCGTCCGAGGGTAGCGCTC | |
| | ATSGSETP | | CAGGTAGCGAACCTGCTACTTCTGGTTCTGAAACT | |
| | | | CCA | |
| LCW0402_069_{—} | GTSTEPSEGSAPGT | 320 | GGTACCTCTACCGAACCGTCCGAGGGTAGCGCACC | 357 |
| GFP-N_D12.ab1 | STEPSEGSAPGSEP | | AGGTACCTCTACTGAACCGTCTGAGGGTAGCGCTC | |
| | ATSGSETP | | ACGGTAGCGAACCGGCAACCTCCGGTTCTGAAACT | |
| | | | CCA | |
| LCW0402_073_{—} | GTSTEPSEGSAPGS | 321 | GGTACTTCTACTGAACCTTCCGAAGGTAGCGCTCC | 358 |
| GFP-N_F12.ab1 | EPATSGSETPGSPA | | AGGTAGCGAACCTGCTACTTCTGGTTCTGAAACCC | |
| | GSPTSTEE | | CAGGTAGCCCGGCTGGCTCTCCGACCTCCACCGAG | |
| | | | GAA | |
| LCW0402_074_{—} | GSEPATSGSETPGS | 322 | GGTAGCGAACCGGCTACTTCCGGCTCTGAGACTCC | 359 |
| GFP-N_G12.ab1 | PAGSPTSTEEGTSE | | AGGTAGCCCAGCTGGTTCTCCAACCTCTACTGAGG | |
| | SATPESGP | | AAGGTACTTCTGAAAGCGCTACCCCTGAATCTGGT | |
| | | | CCA | |
| LCW0402_075_{—} | GTSESATPESGPGS | 323 | GGTACCTCTGAAAGCGCAACTCCTGAGTCTGGCCC | 360 |
| GFP-N_H12.ab1 | EPATSGSETPGTSE | | AGGTAGCGAACCTGCTACCTCCGGCTCTGAGACTC | |
| | SATPESGP | | CAGGTACCTCTGAAAGCGCAACCCCGGAATCTGGT | |
| | | | CCA | |

### Example 3

### Construction of XTEN_AF36 Segments

[0321] A codon library encoding sequences of 36 amino acid length was constructed. The sequences were designated XTEN_AF36. Its segments have the amino acid sequence [X]₃ where X is a 12mer peptide with the sequence: GSTSESPSGTAP (SEQ ID NO: 361), GTSTPESGSASP (SEQ ID NO: 362), GTSPSGESSTAP (SEQ ID NO: 363), or GSTSSTAESPGP (SEQ ID NO: 364). The insert was obtained by annealing the following pairs of phosphorylated synthetic oligonucleotide pairs:

(SEQ ID NO: 365)
AF1for: AGGTTCTACYAGCGAATCYCCKTCTGGYACYGCWCC
(SEQ ID NO: 366)
AF1rev: ACCTGGWGCRGTRCCAGAMGGRGATTCGCTRGTAGA
(SEQ ID NO: 367)
AF2for: AGGTACYTCTACYCCKGAAAGCGGYTCYGCWTCTCC
(SEQ ID NO: 368)
AF2rev: ACCTGGAGAWGCRGARCCGCTTTCMGGRGTAGARGT
(SEQ ID NO: 369)
AF3for: AGGTACYTCYCCKAGCGGYGAATCTTCTACYGCWCC
(SEQ ID NO: 370)
AF3rev: ACCTGGWGCRGTAGAAGATTCRCCGCTMGGRGARGT
(SEQ ID NO: 371)
AF4for: AGGTTCYACYAGCTCTACYGCWGAATCTCCKGGYCC
(SEQ ID NO: 372)
AF4rev: ACCTGGRCCMGGAGATTCWGCRGTAGAGCTRGTRGA

[0322] We also annealed the phosphorylated oligonucleotide 3KpnIstopperFor: AGGTTCGTCTTCACTCGAGGGTAC (SEQ ID NO: 373) and the non-phosphorylated oligonucleotide pr_{—}3KpnIstopperRev: CCTCGAGTGAAGACGA (SEQ ID NO: 374). The annealed oligonucleotide pairs were ligated, which resulted in a mixture of products with varying length that represents the varying number of 12mer repeats ligated to one BbsI/KpnI segment The products corresponding to the length of 36 amino acids were isolated from the mixture by preparative agarose gel electrophoresis and ligated into the BsaI/KpnI digested stuffer vector pCW0359. Most of the clones in the resulting library designated LCW0403 showed green fluorescence after induction which shows that the sequence of XTEN_AF36 had been ligated in frame with the GFP gene and most sequences of XTEN_AF36 show good expression.

[0323] We screened 96 isolates from library LCW0403 for high level of fluorescence by stamping them onto agar plate containing IPTG. The same isolates were evaluated by PCR and 48 isolates were identified that contained segments with 36 amino acids as well as strong fluorescence. These isolates were sequenced and 44 clones were identified that contained correct XTEN_AF36 segments. Nucleotide and amino acid sequences for these segments are listed in Table 11.

TABLE 11
DNA and Amino Acid Sequences for 36-mer motifs

| | | SEQ | | SEQ |
|---|---|---|---|---|
| | | ID | | ID |
| File name | Amino acid sequence | NO: | Nucleotide sequence | NO: |
| LCW0403_004_{—} | GTSTPESGSASPGTSPS | 375 | GGTACTTCTACTCCGGAAAGCGGTTCCGCATCTC | 419 |
| GFP-N_A01.ab1 | GESSTAPGTSPSGESST | | CAGGTACTTCTCCTAGCGGTGAATCTTCTACTGC | |
| | AP | | TCCAGGTACCTCTCCTAGCGGCGAATCTTCTACT | |
| | | | GCTCCA | |
| LCW0403_005_{—} | GTSPSGESSTAPGSTSS | 376 | GGTACTTCTCCGAGCGGTGAATCTTCTACCGCAC | 420 |
| GFP-N_B01.ab1 | TAESPGPGTSPSGESST | | CAGGTTCTACTAGCTCTACCGCTGAATCTCCGGG | |
| | AP | | CCCAGGTACTTCTCCGAGCGGTGAATCTTCTACT | |
| | | | GCTCCA | |
| LCW0403_006_{—} | GSTSSTAESPGPGTSPS | 377 | GGTTCCACCAGCTCTACTGCTGAATCTCCTGGTC | 421 |
| GFP-N_C01.ab1 | GESSTAPGTSTPESGSA | | CAGGTACCTCTCCTAGCGGTGAATCTTCTACTGC | |
| | SP | | TCCAGGTACTTCTACTCCTGAAAGCGGCTCTGCT | |
| | | | TCTCCA | |
| LCW0403_007_{—} | GSTSSTAESPGPGSTSS | 378 | GGTTCTACCAGCTCTACTGCAGAATCTCCTGGCC | 422 |
| GFP-N_DO1.ab1 | TAESPGPGTSPSGESST | | CAGGTTCCACCAGCTCTACCGCAGAATCTCCGGG | |
| | AP | | TCCAGGTACTTCCCCTAGCGGTGAATCTTCTACC | |
| | | | GCACCA | |
| LCW0403_ 08_{—} | GSTSSTAESPGPGTSPS | 379 | GGTTCTACTAGCTCTACTGCTGAATCTCCTGGCC | 423 |
| GFP-N_E01.ab1 | GESSTAPGTSTPESGSA | | CAGGTACTTCTCCTAGCGGTGAATCTTCTACCGC | |
| | SP | | TCCAGGTACCTCTACTCCGGAAAGCGGTTCTGCA | |
| | | | TCTCCA | |
| LCW0403_010_{—} | GSTSSTAESPGPGTSTP | 380 | GGTTCTACCAGCTCTACCGCAGAATCTCCTGGTC | 424 |
| GFP-N_F01.ab1 | ESGSASPGSTSESPSGT | | CAGGTACCTCTACTCCGGAAAGCGGCTCTGCATC | |
| | AP | | TCCAGGTTCTACTAGCGAATCTCCTTCTGGCACT | |
| | | | GCACCA | |
| LCW0403_011_{—} | GSTSSTAESPGPGTSTP | 381 | GGTTCTACTAGCTCTACTGCAGAATCTCCTGGCC | 425 |
| GFP-N_G01.ab1 | ESGSASPGTSTPESGSA | | CAGGTACCTCTACTCCGGAAAGCGGCTCTGCATC | |
| | SP | | TCCAGGTACTTCTACCCCTGAAAGCGGTTCTGCA | |
| | | | TCTCCA | |
| LCW0403_012_{—} | GSTSESPSGTAPGTSPS | 382 | GGTTCTACCAGCGAATCTCCTTCTGGCACCGCTC | 426 |
| GFP-N_H01.ab1 | GESSTAPGSTSESPSGT | | CAGGTACCTCTCCTAGCGGCGAATCTTCTACCGC | |
| | AP | | TCCAGGTTCTACTAGCGAATCTCCTTCTGGCACT | |
| | | | GCACCA | |
| LCW0403_013_{—} | GSTSSTAESPGPGSTSS | 383 | GGTTCCACCAGCTCTACTGCAGAATCTCCGGGCC | 427 |
| GFP-N_A02.ab1 | TAESPGPGTSPSGESST | | CAGGTTCTACTAGCTCTACTGCAGAATCTCCGGG | |
| | AP | | TCCAGGTACTTCTCCTAGCGGCGAATCTTCTACC | |
| | | | GCTCCA | |
| LCW0403_014_{—} | GSTSSTAESPGPGTSTP | 384 | GGTTCCACTAGCTCTACTGCAGAATCTCCTGGCC | 428 |
| GFP-N_B02.ab1 | ESGSASPGSTSESPSGT | | CAGGTACCTCTACCCCTGAAAGCGGCTCTGCATC | |
| | AP | | TCCAGGTTCTACCAGCGAATCCCCGTCTGGCACC | |
| | | | GCACCA | |
| LCW0403_015_{—} | GSTSSTAESPGPGSTSS | 385 | GGTTCTACTAGCTCTACTGCTGAATCTCCGGGTC | 429 |
| GFP-N_C02.ab1 | TAESPGPGTSPSGESST | | CAGGTTCTACCAGCTCTACTGCTGAATCTCCTGG | |
| | AP | | TCCAGGTACCTCCCCGAGCGGTGAATCTTCTACT | |
| | | | GCACCA | |
| LCW0403_017_{—} | GSTSSTAESPGPGSTSE | 386 | GGTTCTACCAGCTCTACCGCTGAATCTCCTGGCC | 430 |
| GFP-N_D02.ab1 | SPSGTAPGSTSSTAESP | | CAGGTTCTACCAGCGAATCCCCGTCTGGCACCGC | |
| | GP | | ACCAGGTTCTACTAGCTCTACCGCTGAATCTCCG | |
| | | | GGTCCA | |
| LCW0403_018_{—} | GSTSSTAESPGPGSTSS | 387 | GGTTCTACCAGCTCTACCGCAGAATCTCCTGGCC | 431 |
| GFP-N_E02.ab1 | TAESPGPGSTSSTAESP | | CAGGTTCCACTAGCTCTACCGCTGAATCTCCTGG | |
| | GP | | TCCAGGTTCTACTAGCTCTACCGCTGAATCTCCT | |
| | | | GGTCCA | |
| LCW0403_019_{—} | GSTSESPSGTAPGSTSS | 388 | GGTTCTACTAGCGAATCCCCTTCTGGTACTGCTC | 432 |
| GFP-N_F02.ab1 | TAESPGPGSTSSTAESP | | CAGGTTCCACTAGCTCTACCGCTGAATCTCCTGG | |
| | GP | | CCCAGGTTCCACTAGCTCTACTGCAGAATCTCCT | |
| | | | GGTCCA | |
| LCW0403_023_{—} | GSTSESPSGTAPGSTSE | 389 | GGTTCTACTAGCGAATCTCCTTCTGGTACCGCTC | 433 |
| GFP-N_H02.ab1 | SPSGTAPGSTSESPSGT | | CAGGTTCTACCAGCGAATCCCCGTCTGGTACTGC | |
| | AP | | TCCAGGTTCTACCAGCGAATCTCCTTCTGGTACT | |
| | | | GCACCA | |
| LCW0403_024_{—} | GSTSSTAESPGPGSTSS | 390 | GGTTCCACCAGCTCTACTGCTGAATCTCCTGGCC | 434 |
| GFP-N_A03.ab1 | TAESPGPGSTSSTAESP | | CAGGTTCTACCAGCTCTACTGCTGAATCTCCGGG | |
| | GP | | CCCAGGTTCCACCAGCTCTACCGCTGAATCTCCG | |
| | | | GGTCCA | |
| LCW0403_025_{—} | GSTSSTAESPGPGSTSS | 391 | GGTTCCACTAGCTCTACCGCAGAATCTCCTGGTC | 435 |
| GFP-N_B03.ab1 | TAESPGPGTSPSGESST | | CAGGTTCTACTAGCTCTACTGCTGAATCTCCGGG | |
| | AP | | TCCAGGTACCTCCCCTAGCGGCGAATCTTCTACC | |
| | | | GCTCCA | |
| LCW0403_028_{—} | GSSPSASTGTGPGSSTP | 392 | GGTTCTAGCCCTTCTGCTTCCACCGGTACCGGCC | 436 |
| GFP-N_D03.ab1 | SGATGSPGSSTPSGAT | | CAGGTAGCTCTACTCCGTCTGGTGCAACTGGCTC | |
| | GSP | | TCCAGGTAGCTCTACTCCGTCTGGTGCAACCGGC | |
| | | | TCCCCA | |
| LCW0403_029_{—} | GTSPSGESSTAPGTSTP | 393 | GGTACTTCCCCTAGCGGTGAATCTTCTACTGCTC | 437 |
| GFP-N_E03.ab1 | ESGSASPGSTSSTAESP | | CAGGTACCTCTACTCCGGAAAGCGGCTCCGCATC | |
| | GP | | TCCAGGTTCTACTAGCTCTACTGCTGAATCTCCT | |
| | | | GGTCCA | |
| LCW0403_030_{—} | GSTSSTAESPGPGSTSS | 394 | GGTTCTACTAGCTCTACCGCTGAATCTCCGGGTC | 438 |
| GFP-N_F03.ab1 | TAESPGPGTSTPESGSA | | CAGGTTCTACCAGCTCTACTGCAGAATCTCCTGG | |
| | SP | | CCCAGGTACTTCTACTCCGGAAAGCGGTTCCGCT | |
| | | | TCTCCA | |
| LCW0403_031_{—} | GTSPSGESSTAPGSTSS | 395 | GGTACTTCTCCTAGCGGTGAATCTTCTACCGCTC | 439 |
| GFP-N_G03.ab1 | TAESPGPGTSTPESGSA | | CAGGTTCTACCAGCTCTACTGCTGAATCTCCTGG | |
| | SP | | CCCAGGTACTTCTACCCCGGAAAGCGGCTCCGCT | |
| | | | TCTCCA | |
| LCW0403_033_{—} | GSTSESPSGTAPGSTSS | 396 | GGTTCTACTAGCGAATCCCCTTCTGGTACTGCAC | 440 |
| GFP-N_H03.ab1 | TAESPGPGSTSSTAESP | | CAGGTTCTACCAGCTCTACTGCTGAATCTCCGGG | |
| | GP | | CCCAGGTTCCACCAGCTCTACCGCAGAATCTCCT | |
| | | | GGTCCA | |
| LCW0403_035_{—} | GSTSSTAESPGPGSTSE | 397 | GGTTCCACCAGCTCTACCGCTGAATCTCCGGGCC | 441 |
| GFP-N_A04.ab1 | SPSGTAPGSTSSTAESP | | CAGGTTCTACCAGCGAATCCCCTTCTGGCACTGC | |
| | GP | | ACCAGGTTCTACTAGCTCTACCGCAGAATCTCCG | |
| | | | GGCCCA | |
| LCW0403_036_{—} | GSTSSTAESPGPGTSPS | 398 | GGTTCTACCAGCTCTACTGCTGAATCTCCGGGTC | 442 |
| GFP-N_B04.ab1 | GESSTAPGTSTPESGSA | | CAGGTACTTCCCCGAGCGGTGAATCTTCTACTGC | |
| | SP | | ACCAGGTACTTCTACTCCGGAAAGCGGTTCCGCT | |
| | | | TCTCCA | |
| LCW0403_039_{—} | GSTSESPSGTAPGSTSE | 399 | GGTTCTACCAGCGAATCTCCTTCTGGCACCGCTC | 443 |
| GFP-N_C04.ab1 | SPSGTAPGTSPSGESST | | CAGGTTCTACTAGCGAATCCCCGTCTGGTACCGC | |
| | AP | | ACCAGGTACTTCTCCTAGCGGCGAATCTTCTACC | |
| | | | GCACCA | |
| LCW0403_041_{—} | GSTSESPSGTAPGSTSE | 400 | GGTTCTACCAGCGAATCCCCTTCTGGTACTGCTC | 444 |
| GFP-N_D04.ab1 | SPSGTAPGTSTPESGSA | | CAGGTTCTACCAGCGAATCCCCTTCTGGCACCGC | |
| | SP | | ACCAGGTACTTCTACCCCTGAAAGCGGCTCCGCT | |
| | | | TCTCCA | |
| LCW0403_044_{—} | GTSTPESGSASPGSTSS | 401 | GGTACCTCTACTCCTGAAAGCGGTTCTGCATCTC | 445 |
| GFP-N_E04.ab1 | TAESPGPGSTSSTAESP | | CAGGTTCCACTAGCTCTACCGCAGAATCTCCGGG | |
| | GP | | CCCAGGTTCTACTAGCTCTACTGCTGAATCTCCT | |
| | | | GGCCCA | |
| LCW0403_046_{—} | GSTSESPSGTAPGSTSE | 402 | GGTTCTACCAGCGAATCCCCTTCTGGCACTGCAC | 446 |
| GFP-N_F04.ab1 | SPSGTAPGTSPSGESST | | CAGGTTCTACTAGCGAATCCCCTTCTGGTACCGC | |
| | AP | | ACCAGGTACTTCTCCGAGCGGCGAATCTTCTACT | |
| | | | GCTCCA | |
| LCW0403_047_{—} | GSTSSTAESPGPGSTSS | 403 | GGTTCTACTAGCTCTACCGCTGAATCTCCTGGCC | 447 |
| GFP-N_G04.ab1 | TAESPGPGSTSESPSGT | | CAGGTTCCACTAGCTCTACCGCAGAATCTCCGGG | |
| | AP | | CCCAGGTTCTACTAGCGAATCCCCTTCTGGTACC | |
| | | | GCTCCA | |
| LCW0403_049_{—} | GSTSSTAESPGPGSTSS | 404 | GGTTCCACCAGCTCTACTGCAGAATCTCCTGGCC | 448 |
| GFP-N_H04.ab1 | TAESPGPGTSTPESGSA | | CAGGTTCTACTAGCTCTACCGCAGAATCTCCTGG | |
| | SP | | TCCAGGTACCTCTACTCCTGAAAGCGGTTCCGCA | |
| | | | TCTCCA | |
| LCW0403_051_{—} | GSTSSTAESPGPGSTSS | 405 | GGTTCTACTAGCTCTACTGCTGAATCTCCGGGCC | 449 |
| GFP-N_A05.ab1 | TAESPGPGSTSESPSGT | | CAGGTTCTACTAGCTCTACCGCTGAATCTCCGGG | |
| | AP | | TCCAGGTTCTACTAGCGAATCTCCTTCTGGTACC | |
| | | | GCTCCA | |
| LCW0403_053_{—} | GTSPSGESSTAPGSTSE | 406 | GGTACCTCCCCGAGCGGTGAATCTTCTACTGCAC | 450 |
| GFP-N_B05.ab1 | SPSGTAPGSTSSTAESP | | CAGGTTCTACTAGCGAATCCCCTTCTGGTACTGC | |
| | GP | | TCCAGGTTCCACCAGCTCTACTGCAGAATCTCCG | |
| | | | GGTCCA | |
| LCW0403_054_{—} | GSTSESPSGTAPGTSPS | 407 | GGTTCTACTAGCGAATCCCCGTCTGGTACTGCTC | 451 |
| GFP-N_C05.ab1 | GESSTAPGSTSSTAESP | | CAGGTACTTCCCCTAGCGGTGAATCTTCTACTGC | |
| | GP | | TCCAGGTTCTACCAGCTCTACCGCAGAATCTCCG | |
| | | | GGTCCA | |
| LCW0403_057_{—} | GSTSSTAESPGPGSTSE | 408 | GGTTCTACCAGCTCTACCGCTGAATCTCCTGGCC | 452 |
| GFP-N_D05.ab1 | SPSGTAPGTSPSGESST | | CAGGTTCTACTAGCGAATCTCCGTCTGGCACCGC | |
| | AP | | ACCAGGTACTTCCCCTAGCGGTGAATCTTCTACT | |
| | | | GCACCA | |
| LCW0403_058_{—} | GSTSESPSGTAPGSTSE | 409 | GGTTCTACTAGCGAATCTCCTTCTGGCACTGCAC | 453 |
| GFP-N_E05.abl | SPSGTAPGTSTPESGSA | | CAGGTTCTACCAGCGAATCTCCGTCTGGCACTGC | |
| | SP | | ACCAGGTACCTCTACCCCTGAAAGCGGTTCCGCT | |
| | | | TCTCCA | |
| LCW0403_060_{—} | GTSTPESGSASPGSTSE | 410 | GGTACCTCTACTCCGGAAAGCGGTTCCGCATCTC | 454 |
| GFP-N_F05.ab1 | SPSGTAPGSTSSTAESP | | CAGGTTCTACCAGCGAATCCCCGTCTGGCACCGC | |
| | GP | | ACCAGGTTCTACTAGCTCTACTGCTGAATCTCCG | |
| | | | GGCCCA | |
| LCW0403_063_{—} | GSTSSTAESPGPGTSPS | 411 | GGTTCTACTAGCTCTACTGCAGAATCTCCGGGCC | 455 |
| GFP-N_G05.ab1 | GESSTAPGTSPSGESST | | CAGGTACCTCTCCTAGCGGTGAATCTTCTACCGC | |
| | AP | | TCCAGGTACTTCTCCGAGCGGTGAATCTTCTACC | |
| | | | GCTCCA | |
| LCW0403_064_{—} | GTSPSGESSTAPGTSPS | 412 | GGTACCTCCCCTAGCGGCGAATCTTCTACTGCTC | 456 |
| GFP-N_H05.ab1 | GESSTAPGTSPSGESST | | CAGGTACCTCTCCTAGCGGCGAATCTTCTACCGC | |
| | AP | | TCCAGGTACCTCCCCTAGCGGTGAATCTTCTACC | |
| | | | GCACCA | |
| LCW0403_065_{—} | GSTSSTAESPGPGTSTP | 413 | GGTTCCACTAGCTCTACTGCTGAATCTCCTGGCC | 457 |
| GFP-N_A06.ab1 | ESGSASPGSTSESPSGT | | CAGGTACTTCTACTCCGGAAAGCGGTTCCGCTTC | |
| | AP | | TCCAGGTTCTACTAGCGAATCTCCGTCTGGCACC | |
| | | | GCACCA | |
| LCW0403_066_{—} | GSTSESPSGTAPGTSPS | 414 | GGTTCTACTAGCGAATCTCCGTCTGGCACTGCTC | 458 |
| GFP-N_B06.ab1 | GESSTAPGTSPSGESST | | CAGGTACTTCTCCTAGCGGTGAATCTTCTACCGC | |
| | AP | | TCCAGGTACTTCCCCTAGCGGCGAATCTTCTACC | |
| | | | GCTCCA | |
| LCW0403_067_{—} | GSTSESPSGTAPGTSTP | 415 | GGTTCTACTAGCGAATCTCCTTCTGGTACCGCTC | 459 |
| GFP-N_C06.ab1 | ESGSASPGSTSSTAESP | | CAGGTACTTCTACCCCTGAAAGCGGCTCCGCTTC | |
| | GP | | TCCAGGTTCCACTAGCTCTACCGCTGAATCTCCG | |
| | | | GGTCCA | |
| LCW0403_068_{—} | GSTSSTAESPGPGSTSS | 416 | GGTTCCACTAGCTCTACTGCTGAATCTCCTGGCC | 460 |
| GFP-N_D06.ab1 | TAESPGPGSTSESPSGT | | CAGGTTCTACCAGCTCTACCGCTGAATCTCCTGG | |
| | AP | | CCCAGGTTCTACCAGCGAATCTCCGTCTGGCACC | |
| | | | GCACCA | |
| LCW0403_069_{—} | GSTSESPSGTAPGTSTP | 417 | GGTTCTACTAGCGAATCCCCGTCTGGTACCGCAC | 461 |
| GFP-N_E06.ab1 | ESGSASPGTSTPESGSA | | CAGGTACTTCTACCCCGGAAAGCGGCTCTGCTTC | |
| | SP | | TCCAGGTACTTCTACCCCGGAAAGCGGCTCCGCA | |
| | | | TCTCCA | |
| LCW0403_070_{—} | GSTSESPSGTAPGTSTP | 418 | GGTTCTACTAGCGAATCCCCGTCTGGTACTGCTC | 462 |
| GFP-N_F06.ab1 | ESGSASPGTSTPESGSA | | CAGGTACTTCTACTCCTGAAAGCGGTTCCGCTTC | |
| | SP | | TCCAGGTACCTCTACTCCGGAAAGCGGTTCTGCA | |
| | | | TCTCCA | |

### Example 4

### Construction of XTEN_AG36 segments

[0324] A codon library encoding sequences of 36 amino acid length was constructed. The sequences were designated XTEN_AG36. Its segments have the amino acid sequence [X]₃ where X is a 12mer peptide with the sequence: GTPGSGTASSSP (SEQ ID NO: 463), GSSTPSGATGSP (SEQ ID NO: 464), GSSPSASTGTGP (SEQ ID NO: 465), or GASPGTSSTGSP (SEQ ID NO: 466). The insert was obtained by annealing the following pairs of phosphorylated synthetic oligonucleotide pairs:

(SEQ ID NO: 467)
AG1for: AGGTACYCCKGGYAGCGGTACYGCWTCTTCYTCTCC
(SEQ ID NO: 468)
AG1rev: ACCTGGAGARGAAGAWGCRGTACCGCTRCCMGGRGT
(SEQ ID NO: 469)
AG2for: AGGTAGCTCTACYCCKTCTGGTGCWACYGGYTCYCC
(SEQ ID NO: 470)
AG2rev: ACCTGGRGARCCRGTWGCACCAGAMGGRGTAGAGCT
(SEQ ID NO: 471)
AG3for: AGGTTCTAGCCCKTCTGCWTCYACYGGTACYGGYCC
(SEQ ID NO: 472)
AG3rev: ACCTGGRCCRGTACCRGTRGAWGCAGAMGGGCTAGA
(SEQ ID NO: 473)
AG4for: AGGTGCWTCYCCKGGYACYAGCTCTACYGGTTCTCC
(SEQ ID NO: 474)
AG4rev: ACCTGGAGAACCRGTAGAGCTRGTRCCMGGRGAWGC

[0325] We also annealed the phosphorylated oligonucleotide 3KpnIstopperFor: AGGTTCGTCTTCACTCGAGGGTAC (SEQ ID NO: 475) and the non-phosphorylated oligonucleotide pr_{—}3KpnIstopperRev: CCTCGAGTGAAGACGA (SEQ ID NO: 476). The annealed oligonucleotide pairs were ligated, which resulted in a mixture of products with varying length that represents the varying number of 12mer repeats ligated to one BbsI/KpnI segment. The products corresponding to the length of 36 amino acids were isolated from the mixture by preparative agarose gel electrophoresis and ligated into the BsaI/KpnI digested stuffer vector pCW0359. Most of the clones in the resulting library designated LCW0404 showed green fluorescence after induction which shows that the sequence of XTEN_AG36 had been ligated in frame with the GFP gene and most sequences of XTEN_AG36 show good expression.

[0326] We screened 96 isolates from library LCW0404 for high level of fluorescence by stamping them onto agar plate containing IPTG. The same isolates were evaluated by PCR and 48 isolates were identified that contained segments with 36 amino acids as well as strong fluorescence. These isolates were sequenced and 44 clones were identified that contained correct XTEN_AG36 segments. Nucleotide and amino acid sequences for these segments are listed in Table 12.

TABLE 12
DNA and Amino Acid Sequences for 36-mer motifs

| | | SEQ | | SEQ |
|---|---|---|---|---|
| | | ID | | ID |
| File name | Amino acid sequence | NO: | Nucleotide sequence | NO: |
| LCW0404_001_{—} | GASPGTSSTGSPGT | 477 | GGTGCATCCCCGGGCACTAGCTCTACCGGTTCTC | 521 |
| GFP-N_A07.ab1 | PGSGTASSSPGSST | | CAGGTACTCCTGGTAGCGGTACTGCTTCTTCTTC | |
| | PSGATGSP | | TCCAGGTAGCTCTACTCCTTCTGGTGCTACTGGT | |
| | | | TCTCCA | |
| LCW0404_003_{—} | GSSTPSGATGSPGS | 478 | GGTAGCTCTACCCCTTCTGGTGCTACCGGCTCTC | 522 |
| GFP-N_B07.ab1 | SPSASTGTGPGSST | | CAGGTTCTAGCCCGTCTGCTTCTACCGGTACCGG | |
| | PSGATGSP | | TCCAGGTAGCTCTACCCCTTCTGGTGCTACTGGT | |
| | | | TCTCCA | |
| LCW0404_006_{—} | GASPGTSSTGSPGS | 479 | GGTGCATCTCCGGGTACTAGCTCTACCGGTTCTC | 523 |
| GFP-N_C07.ab1 | SPSASTGTGPGSST | | CAGGTTCTAGCCCTTCTGCTTCCACTGGTACCGG | |
| | PSGATGSP | | CCCAGGTAGCTCTACCCCGTCTGGTGCTACTGGT | |
| | | | TCCCCA | |
| LCW0404_007_{—} | GTPGSGTASSSPGS | 480 | GGTACTCCGGGCAGCGGTACTGCTTCTTCCTCTC | 524 |
| GFP-N_D07.ab1 | STPSGATGSPGASP | | CAGGTAGCTCTACCCCTTCTGGTGCAACTGGTTC | |
| | GTSSTGSP | | CCCAGGTGCATCCCCTGGTACTAGCTCTACCGGT | |
| | | | TCTCCA | |
| LCW0404_009_{—} | GTPGSGTASSSPGA | 481 | GGTACCCCTGGCAGCGGTACTGCTTCTTCTTCTC | 525 |
| GFP-N_E07.ab1 | SPGTSSTGSPGSRP | | CAGGTGCTTCCCCTGGTACCAGCTCTACCGGTTC | |
| | SASTGTGP | | TCCAGGTTCTAGACCTTCTGCATCCACCGGTACT | |
| | | | GGTCCA | |
| LCW0404_011_{—} | GASPGTSSTGSPGS | 482 | GGTGCATCTCCTGGTACCAGCTCTACCGGTTCTC | 526 |
| GFP-N_F07.ab1 | STPSGATGSPGASP | | CAGGTAGCTCTACTCCTTCTGGTGCTACTGGCTC | |
| | GTSSTGSP | | TCCAGGTGCTTCCCCGGGTACCAGCTCTACCGGT | |
| | | | TCTCCA | |
| LCW0404_012_{—} | GTPGSGTASSSPGS | 483 | GGTACCCCGGGCAGCGGTACCGCATCTTCCTCTC | 527 |
| GFP-N_G07.ab1 | STPSGATGSPGSSTP | | CAGGTAGCTCTACCCCGTCTGGTGCTACCGGTTC | |
| | SGATGSP | | CCCAGGTAGCTCTACCCCGTCTGGTGCAACCGGC | |
| | | | TCCCCA | |
| LCW0404_014_{—} | GASPGTSSTGSPGA | 484 | GGTGCATCTCCGGGCACTAGCTCTACTGGTTCTC | 528 |
| GFP-N_H07.ab1 | SPGTSSTGSPGASP | | CAGGTGCATCCCCTGGCACTAGCTCTACTGGTTC | |
| | GTSSTGSP | | TCCAGGTGCTTCTCCTGGTACCAGCTCTACTGGT | |
| | | | TCTCCA | |
| LCW0404_015_{—} | GSSTPSGATGSPGS | 485 | GGTAGCTCTACTCCGTCTGGTGCAACCGGCTCCC | 529 |
| GFP-N_A08.ab1 | SPSASTGTGPGASP | | CAGGTTCTAGCCCGTCTGCTTCCACTGGTACTGG | |
| | GTSSTGSP | | CCCAGGTGCTTCCCCGGGCACCAGCTCTACTGGT | |
| | | | TCTCCA | |
| LCW0404_016_{—} | GSSTPSGATGSPGS | 486 | GGTAGCTCTACTCCTTCTGGTGCTACCGGTTCCC | 530 |
| GFP-N_B08.ab1 | STPSGATGSPGTPG | | CAGGTAGCTCTACTCCTTCTGGTGCTACTGGTTC | |
| | SGTASSSP | | CCCAGGTACTCCGGGCAGCGGTACTGCTTCTTCC | |
| | | | TCTCCA | |
| LCW0404_017_{—} | GSSTPSGATGSPGS | 487 | GGTAGCTCTACTCCGTCTGGTGCAACCGGTTCCC | 531 |
| GFP-N_C08.ab1 | STPSGATGSPGASP | | CAGGTAGCTCTACTCCTTCTGGTGCTACTGGCTC | |
| | GTSSTGSP | | CCCAGGTGCATCCCCTGGCACCAGCTCTACCGGT | |
| | | | TCTCCA | |
| LCW0404_018_{—} | GTPGSGTASSSPGS | 488 | GGTACTCCTGGTAGCGGTACCGCATCTTCCTCTC | 532 |
| GFP-N_D08.ab1 | SPSASTGTGPGSST | | CAGGTTCTAGCCCTTCTGCATCTACCGGTACCGG | |
| | PSGATGSP | | TCCAGGTAGCTCTACTCCTTCTGGTGCTACTGGC | |
| | | | TCTCCA | |
| LCW0404_023_{—} | GASPGTSSTGSPGS | 489 | GGTGCTTCCCCGGGCACTAGCTCTACCGGTTCTC | 533 |
| GFP-N_F08.ab1 | SPSASTGTGPGTPG | | CAGGTTCTAGCCCTTCTGCATCTACTGGTACTGG | |
| | SGTASSSP | | CCCAGGTACTCCGGGCAGCGGTACTGCTTCTTCC | |
| | | | TCTCCA | |
| LCW0404_025_{—} | GSSTPSGATGSPGS | 490 | GGTAGCTCTACTCCGTCTGGTGCTACCGGCTCTC | 534 |
| GFP-N_G08.ab1 | STPSGATGSPGASP | | CAGGTAGCTCTACCCCTTCTGGTGCAACCGGCTC | |
| | GTSSTGSP | | CCCAGGTGCTTCTCCGGGTACCAGCTCTACTGGT | |
| | | | TCTCCA | |
| LCW0404_029_{—} | GTPGSGTASSSPGS | 491 | GGTACCCCTGGCAGCGGTACCGCTTCTTCCTCTC | 535 |
| GFP-N_A09.ab1 | STPSGATGSPGSSP | | CAGGTAGCTCTACCCCGTCTGGTGCTACTGGCTC | |
| | SASTGTGP | | TCCAGGTTCTAGCCCGTCTGCATCTACCGGTACC | |
| | | | GGCCCA | |
| LCW0404_030_{—} | GSSTPSGATGSPGT | 492 | GGTAGCTCTACTCCTTCTGGTGCAACCGGCTCCC | 536 |
| GFP-N_B09.ab1 | PGSGTASSSPGTPG | | CAGGTACCCCGGGCAGCGGTACCGCATCTTCCTC | |
| | SGTASSSP | | TCCAGGTACTCCGGGTAGCGGTACTGCTTCTTCT | |
| | | | TCTCCA | |
| LCW0404_031_{—} | GTPGSGTASSSPGS | 493 | GGTACCCCGGGTAGCGGTACTGCTTCTTCCTCTC | 537 |
| GFP-N_C09.ab1 | STPSGATGSPGASP | | CAGGTAGCTCTACCCCTTCTGGTGCAACCGGCTC | |
| | GTSSTGSP | | TCCAGGTGCTTCTCCGGGCACCAGCTCTACCGGT | |
| | | | TCTCCA | |
| LCW0404_034_{—} | GSSTPSGATGSPGS | 494 | GGTAGCTCTACCCCGTCTGGTGCTACCGGCTCTC | 538 |
| GFP-N_D09.ab1 | STPSGATGSPGASP | | CAGGTAGCTCTACCCCGTCTGGTGCAACCGGCTC | |
| | GTSSTGSP | | CCCAGGTGCATCCCCGGGTACTAGCTCTACCGGT | |
| | | | TCTCCA | |
| LCW0404_035_{—} | GASPGTSSTGSPGT | 495 | GGTGCTTCTCCGGGCACCAGCTCTACTGGTTCTC | 539 |
| GFP-N_E09.ab1 | PGSGTASSSPGSST | | CAGGTACCCCGGGCAGCGGTACCGCATCTTCTTC | |
| | PSGATGSP | | TCCAGGTAGCTCTACTCCTTCTGGTGCAACTGGT | |
| | | | TCTCCA | |
| LCW0404_036_{—} | GSSPSASTGTGPGS | 496 | GGTTCTAGCCCGTCTGCTTCCACCGGTACTGGCC | 540 |
| GFP-N_F09.ab1 | STPSGATGSPGTPG | | CAGGTAGCTCTACCCCGTCTGGTGCAACTGGTTC | |
| | SGTASSSP | | CCCAGGTACCCCTGGTAGCGGTACCGCTTCTTCT | |
| | | | TCTCCA | |
| LCW0404_037_{—} | GASPGTSSTGSPGS | 497 | GGTGCTTCTCCGGGCACCAGCTCTACTGGTTCTC | 541 |
| GFP-N_G09.ab1 | SPSASTGTGPGSST | | CAGGTTCTAGCCCTTCTGCATCCACCGGTACCGG | |
| | PSGATGSP | | TCCAGGTAGCTCTACCCCTTCTGGTGCAACCGGC | |
| | | | TCTCCA | |
| LCW0404_040_{—} | GASPGTSSTGSPGS | 498 | GGTGCATCCCCGGGCACCAGCTCTACCGGTTCTC | 542 |
| GFP-N_H09.ab1 | STPSGATGSPGSST | | CAGGTAGCTCTACCCCGTCTGGTGCTACCGGCTC | |
| | PSGATGSP | | TCCAGGTAGCTCTACCCCGTCTGGTGCTACTGGC | |
| | | | TCTCCA | |
| LCW0404_041_{—} | GTPGSGTASSSPGS | 499 | GGTACCCCTGGTAGCGGTACTGCTTCTTCCTCTC | 543 |
| GFP-N_A10.ab1 | STPSGATGSPGTPG | | CAGGTAGCTCTACTCCGTCTGGTGCTACCGGTTC | |
| | SGTASSSP | | TCCAGGTACCCCGGGTAGCGGTACCGCATCTTCT | |
| | | | TCTCCA | |
| LCW0404_043_{—} | GSSPSASTGTGPGS | 500 | GGTTCTAGCCCTTCTGCTTCCACCGGTACTGGCC | 544 |
| GFP-N_C10.ab1 | STPSGATGSPGSST | | CAGGTAGCTCTACCCCTTCTGGTGCTACCGGCTC | |
| | PSGATGSP | | CCCAGGTAGCTCTACTCCTTCTGGTGCAACTGGC | |
| | | | TCTCCA | |
| LCW0404_045_{—} | GASPGTSSTGSPGS | 501 | GGTGCTTCTCCTGGCACCAGCTCTACTGGTTCTC | 545 |
| GFP-N_D10.ab1 | SPSASTGTGPGSSP | | CAGGTTCTAGCCCTTCTGCTTCTACCGGTACTGG | |
| | SASTGTGP | | TCCAGGTTCTAGCCCTTCTGCATCCACTGGTACT | |
| | | | GGTCCA | |
| LCW0404_047_{—} | GTPGSGTASSSPGA | 502 | GGTACTCCTGGCAGCGGTACCGCTTCTTCTTCTC | 546 |
| GFP-N_F10.ab1 | SPGTSSTGSPGASP | | CAGGTGCTTCTCCTGGTACTAGCTCTACTGGTTC | |
| | GTSSTGSP | | TCCAGGTGCTTCTCCGGGCACTAGCTCTACTGGT | |
| | | | TCTCCA | |
| LCW0404_048_{—} | GSSTPSGATGSPGA | 503 | GGTAGCTCTACCCCGTCTGGTGCTACCGGTTCCC | 547 |
| GFP-N_G10.ab1 | SPGTSSTGSPGSST | | CAGGTGCTTCTCCTGGTACTAGCTCTACCGGTTC | |
| | PSGATGSP | | TCCAGGTAGCTCTACCCCGTCTGGTGCTACTGGC | |
| | | | TCTCCA | |
| LCW0404_049_{—} | GSSTPSGATGSPGT | 504 | GGTAGCTCTACCCCGTCTGGTGCTACTGGTTCTC | 548 |
| GFP-N_H10.ab1 | PGSGTASSSPGSSTP | | CAGGTACTCCGGGCAGCGGTACTGCTTCTTCCTC | |
| | SGATGSP | | TCCAGGTAGCTCTACCCCTTCTGGTGCTACTGGC | |
| | | | TCTCCA | |
| LCW0404_050_{—} | GASPGTSSTGSPGS | 505 | GGTGCATCTCCTGGTACCAGCTCTACTGGTTCTC | 549 |
| GFP-N_A11.ab1 | SPSASTGTGPGSSTP | | CAGGTTCTAGCCCTTCTGCTTCTACCGGTACCGG | |
| | SGATGSP | | TCCAGGTAGCTCTACTCCTTCTGGTGCTACCGGT | |
| | | | TCTCCA | |
| LCW0404_051_{—} | GSSTPSGATGSPGS | 506 | GGTAGCTCTACCCCGTCTGGTGCTACTGGCTCTC | 550 |
| GFP-N_B11.ab1 | STPSGATGSPGSST | | CAGGTAGCTCTACTCCTTCTGGTGCTACTGGTTC | |
| | PSGATGSP | | CCCAGGTAGCTCTACCCCGTCTGGTGCAACTGGC | |
| | | | TCTCCA | |
| LCW0404_052_{—} | GASPGTSSTGSPGT | 507 | GGTGCATCCCCGGGTACCAGCTCTACCGGTTCTC | 551 |
| GFP-N_C11.ab1 | PGSGTASSSPGASP | | CAGGTACTCCTGGCAGCGGTACTGCATCTTCCTC | |
| | GTSSTGSP | | TCCAGGTGCTTCTCCGGGCACCAGCTCTACTGGT | |
| | | | TCTCCA | |
| LCW0404_053_{—} | GSSTPSGATGSPGS | 508 | GGTAGCTCTACTCCTTCTGGTGCAACTGGTTCTC | 552 |
| GFP-N_D11.ab1 | SPSASTGTGPGASP | | CAGGTTCTAGCCCGTCTGCATCCACTGGTACCGG | |
| | GTSSTGSP | | TCCAGGTGCTTCCCCTGGCACCAGCTCTACCGGT | |
| | | | TCTCCA | |
| LCW0404_057_{—} | GASPGTSSTGSPGS | 509 | GGTGCATCTCCTGGTACTAGCTCTACTGGTTCTC | 553 |
| GFP-N_E11.ab1 | STPSGATGSPGSSP | | CAGGTAGCTCTACTCCGTCTGGTGCAACCGGCTC | |
| | SASTGTGP | | TCCAGGTTCTAGCCCTTCTGCATCTACCGGTACT | |
| | | | GGTCCA | |
| LCW0404_060_{—} | GTPGSGTASSSPGS | 510 | GGTACTCCTGGCAGCGGTACCGCATCTTCCTCTC | 554 |
| GFP-N_F11.ab1 | STPSGATGSPGASP | | CAGGTAGCTCTACTCCGTCTGGTGCAACTGGTTC | |
| | GTSSTGSP | | CCCAGGTGCTTCTCCGGGTACCAGCTCTACCGGT | |
| | | | TCTCCA | |
| LCW0404_062_{—} | GSSTPSGATGSPGT | 511 | GGTAGCTCTACCCCGTCTGGTGCAACCGGCTCCC | 555 |
| GFP-N_G11.ab1 | PGSGTASSSPGSST | | CAGGTACTCCTGGTAGCGGTACCGCTTCTTCTTC | |
| | PSGATGSP | | TCCAGGTAGCTCTACTCCGTCTGGTGCTACCGGC | |
| | | | TCCCCA | |
| LCW0404_066_{—} | GSSPSASTGTGPGS | 512 | GGTTCTAGCCCTTCTGCATCCACCGGTACCGGCC | 556 |
| GFP-N_H11.ab1 | SPSASTGTGPGASP | | CAGGTTCTAGCCCGTCTGCTTCTACCGGTACTGG | |
| | GTSSTGSP | | TCCAGGTGCTTCTCCGGGTACTAGCTCTACTGGT | |
| | | | TCTCCA | |
| LCW0404_067_{—} | GTPGSGTASSSPGS | 513 | GGTACCCCGGGTAGCGGTACCGCTTCTTCTTCTC | 557 |
| GFP-N_A12.ab1 | STPSGATGSPGSNP | | CAGGTAGCTCTACTCCGTCTGGTGCTACCGGCTC | |
| | SASTGTGP | | TCCAGGTTCTAACCCTTCTGCATCCACCGGTACC | |
| | | | GGCCCA | |
| LCW0404_068_{—} | GSSPSASTGTGPGS | 514 | GGTTCTAGCCCTTCTGCATCTACTGGTACTGGCC | 558 |
| GFP-N_B12.ab1 | STPSGATGSPGASP | | CAGGTAGCTCTACTCCTTCTGGTGCTACCGGCTC | |
| | GTSSTGSP | | TCCAGGTGCTTCTCCGGGTACTAGCTCTACCGGT | |
| | | | TCTCCA | |
| LCW0404_069_{—} | GSSTPSGATGSPGA | 515 | GGTAGCTCTACCCCTTCTGGTGCAACCGGCTCTC | 559 |
| GFP-N_C12.ab1 | SPGTSSTGSPGTPG | | CAGGTGCATCCCCGGGTACCAGCTCTACCGGTTC | |
| | SGTASSSP | | TCCAGGTACTCCGGGTAGCGGTACCGCTTCTTCC | |
| | | | TCTCCA | |
| LCW0404_070_{—} | GSSTPSGATGSPGS | 516 | GGTAGCTCTACTCCGTCTGGTGCAACCGGTTCCC | 560 |
| GFP-N_D12.ab1 | STPSGATGSPGSST | | CAGGTAGCTCTACCCCTTCTGGTGCAACCGGCTC | |
| | PSGATGSP | | CCCAGGTAGCTCTACCCCTTCTGGTGCAACTGGC | |
| | | | TCTCCA | |
| LCW0404_073_{—} | GASPGTSSTGSPGT | 517 | GGTGCTTCTCCTGGCACTAGCTCTACCGGTTCTC | 561 |
| GFP-N_E12.ab1 | PGSGTASSSPGSST | | CAGGTACCCCTGGTAGCGGTACCGCATCTTCCTC | |
| | PSGATGSP | | TCCAGGTAGCTCTACTCCTTCTGGTGCTACTGGT | |
| | | | TCCCCA | |
| LCW0404_075_{—} | GSSTPSGATGSPGS | 518 | GGTAGCTCTACCCCGTCTGGTGCTACTGGCTCCC | 562 |
| GFP-N_F12.ab1 | SPSASTGTGPGSSP | | CAGGTTCTAGCCCTTCTGCATCCACCGGTACCGG | |
| | SASTGTGP | | TCCAGGTTCTAGCCCGTCTGCATCTACTGGTACT | |
| | | | GGTCCA | |
| LCW0404_080_{—} | GASPGTSSTGSPGS | 519 | GGTGCTTCCCCGGGCACCAGCTCTACTGGTTCTC | 563 |
| GFP-N_G12.ab1 | SPSASTGTGPGSSP | | CAGGTTCTAGCCCGTCTGCTTCTACTGGTACTGG | |
| | SASTGTGP | | TCCAGGTTCTAGCCCTTCTGCTTCCACTGGTACT | |
| | | | GGTCCA | |
| LCW0404_081_{—} | GASPGTSSTGSPGS | 520 | GGTGCTTCCCCGGGTACCAGCTCTACCGGTTCTC | 564 |
| GFP-N_H12.ab1 | SPSASTGTGPGTPG | | CAGGTTCTAGCCCTTCTGCTTCTACCGGTACCGG | |
| | SGTASSSP | | TCCAGGTACCCCTGGCAGCGGTACCGCATCTTCC | |
| | | | TCTCCA | |

### Example 5

### Construction of XTEN_AE864

[0327] XTEN_AE864 was constructed from serial dimerization of XTEN_AE36 to AE72, 144, 288, 576 and 864. A collection of XTEN_AE72 segments was constructed from 37 different segments of XTEN_AE36. Cultures of E. coli harboring all 37 different 36-amino acid segments were mixed and plasmid was isolated. This plasmid pool was digested with BsaI/NcoI to generate the small fragment as the insert. The same plasmid pool was digested with BbsI/NcoI to generate the large fragment as the vector. The insert and vector fragments were ligated resulting in a doubling of the length and the ligation mixture was transformed into BL21Gold(DE3) cells to obtain colonies of XTEN_AE72.

[0328] This library of XTEN_AE72 segments was designated LCW0406. All clones from LCW0406 were combined and dimerized again using the same process as described above yielding library LCW0410 of XTEN_AE144. All clones from LCW0410 were combined and dimerized again using the same process as described above yielding library LCW0414 of XTEN_AE288. Two isolates LCW0414.001 and LCW0414.002 were randomly picked from the library and sequenced to verify the identities. All clones from LCW0414 were combined and dimerized again using the same process as described above yielding library LCW0418 of XTEN_AE576. We screened 96 isolates from library LCW0418 for high level of GFP fluorescence. 8 isolates with right sizes of inserts by PCR and strong fluorescence were sequenced and 2 isolates (LCW0418.018 and LCW0418.052) were chosen for future use based on sequencing and expression data.

[0329] The specific clone pCW0432 of XTEN_AE864 was constructed by combining LCW0418.018 of XTEN_AE576 and LCW0414.002 of XTEN_AE288 using the same dimerization process as described above.

### Example 6

### Construction of XTEN_AM144

[0330] A collection of XTEN_AM144 segments was constructed starting from 37 different segments of XTEN_AE36, 44 segments of XTEN_AF36, and 44 segments of XTEN_AG36.

[0331] Cultures of E. coli that harboring all 125 different 36-amino acid segments were mixed and plasmid was isolated. This plasmid pool was digested with BsaI/NcoI to generate the small fragment as the insert. The same plasmid pool was digested with BbsI/NcoI to generate the large fragment as the vector. The insert and vector fragments were ligated resulting in a doubling of the length and the ligation mixture was transformed into BL21Gold(DE3) cells to obtain colonies of XTEN_AM72.

[0332] This library of XTEN_AM72 segments was designated LCW0461. All clones from LCW0461 were combined and dimerized again using the same process as described above yielding library LCW0462. 1512 Isolates from library LCW0462 were screened for protein expression. Individual colonies were transferred into 96 well plates and cultured overnight as starter cultures. These starter cultures were diluted into fresh autoinduction medium and cultured for 20-30 h. Expression was measured using a fluorescence plate reader with excitation at 395 nm and emission at 510 nm. 192 isolates showed high level expression and were submitted to DNA sequencing. Most clones in library LCW0462 showed good expression and similar physicochemical properties suggesting that most combinations of XTEN_AM36 segments yield useful XTEN sequences. 30 isolates from LCW0462 were chosen as a preferred collection of XTEN_AM144 segments for the construction of multifunctional proteins that contain multiple XTEN segments. These preferred XTEN_AM144 segments are listed below in Table 13.

TABLE 13
DNA and amino acid sequences for AM144 segments

| | | SEQ | | SEQ |
|---|---|---|---|---|
| | | ID | | ID |
| Clone | Sequence Trimmed | NO: | Protein Sequence | NO: |
| LCW462_{—} | GGTACCCCGGGCAGCGGTACCGCATCTTCCTCTCC | 565 | GTPGSGTASSSPG | 598 |
| r1 | AGGTAGCTCTACCCCGTCTGGTGCTACCGGTTCCC | | SSTPSGATGSPGS | |
| | CAGGTAGCTCTACCCCGTCTGGTGCAACCGGCTC | | STPSGATGSPGSP | |
| | CCCAGGTAGCCCGGCTGGCTCTCCTACCTCTACTG | | AGSPTSTEEGTSE | |
| | AGGAAGGTACTTCTGAAAGCGCTACTCCTGAGTC | | SATPESGPGTSTE | |
| | TGGTCCAGGTACCTCTACTGAACCGTCCGAAGGT | | PSEGSAPGSSPSA | |
| | AGCGCTCCAGGTTCTAGCCCTTCTGCATCCACCGG | | STGTGPGSSPSAS | |
| | TACCGGCCCAGGTTCTAGCCCGTCTGCTTCTACCG | | TGTGPGASPGTSS | |
| | GTACTGGTCCAGGTGCTTCTCCGGGTACTAGCTCT | | TGSPGTSTEPSEG | |
| | ACTGGTTCTCCAGGTACCTCTACCGAACCGTCCGA | | SAPGTSTEPSEGS | |
| | GGGTAGCGCACCAGGTACCTCTACTGAACCGTCT | | APGSEPATSGSET | |
| | GAGGGTAGCGCTCCAGGTAGCGAACCGGCAACCT | | P | |
| | CCGGTTCTGAAACTCCA | | | |
| LCW462_{—} | GGTTCTACCAGCGAATCCCCTTCTGGCACTGCACC | 566 | GSTSESPSGTAPG | 599 |
| r5 | AGGTTCTACTAGCGAATCCCCTTCTGGTACCGCAC | | STSESPSGTAPGT | |
| | CAGGTACTTCTCCGAGCGGCGAATCTTCTACTGCT | | SPSGESSTAPGTS | |
| | CCAGGTACCTCTACTGAACCTTCCGAAGGCAGCG | | TEPSEGSAPGTST | |
| | CTCCAGGTACCTCTACCGAACCGTCCGAGGGCAG | | EPSEGSAPGTSES | |
| | CGCACCAGGTACTTCTGAAAGCGCAACCCCTGAA | | ATPESGPGASPGT | |
| | TCCGGTCCAGGTGCATCTCCTGGTACCAGCTCTAC | | SSTGSPGSSTPSG | |
| | CGGTTCTCCAGGTAGCTCTACTCCTTCTGGTGCTA | | ATGSPGASPGTSS | |
| | CTGGCTCTCCAGGTGCTTCCCCGGGTACCAGCTCT | | TGSPGSTSESPSG | |
| | ACCGGTTCTCCAGGTTCTACTAGCGAATCTCCTTC | | TAPGSTSESPSGT | |
| | TGGCACTGCACCAGGTTCTACCAGCGAATCTCCG | | APGTSTPESGSAS | |
| | TCTGGCACTGCACCAGGTACCTCTACCCCTGAAA | | P | |
| | GCGGTTCCGCTTCTCCA | | | |
| LCW462_{—} | GGTACTTCTACCGAACCTTCCGAGGGCAGCGCAC | 567 | GTSTEPSEGSAPG | 600 |
| r9 | CAGGTACTTCTGAAAGCGCTACCCCTGAGTCCGG | | TSESATPESGPGT | |
| | CCCAGGTACTTCTGAAAGCGCTACTCCTGAATCC | | SESATPESGPGTS | |
| | GGTCCAGGTACCTCTACTGAACCTTCTGAGGGCA | | TEPSEGSAPGTSE | |
| | GCGCTCCAGGTACTTCTGAAAGCGCTACCCCGGA | | SATPESGPGTSTE | |
| | GTCCGGTCCAGGTACTTCTACTGAACCGTCCGAA | | PSEGSAPGTSTEP | |
| | GGTAGCGCACCAGGTACTTCTACTGAACCTTCCG | | SEGSAPGSEPATS | |
| | AAGGTAGCGCTCCAGGTAGCGAACCTGCTACTTC | | GSETPGSPAGSPT | |
| | TGGTTCTGAAACCCCAGGTAGCCCGGCTGGCTCT | | STEEGASPGTSST | |
| | CCGACCTCCACCGAGGAAGGTGCTTCTCCTGGCA | | GSPGSSPSASTGT | |
| | CCAGCTCTACTGGTTCTCCAGGTTCTAGCCCTTCT | | GPGSSPSASTGTG | |
| | GCTTCTACCGGTACTGGTCCAGGTTCTAGCCCTTC | | P | |
| | TGCATCCACTGGTACTGGTCCA | | | |
| LCW462_{—} | GGTAGCGAACCGGCAACCTCTGGCTCTGAAACCC | 568 | GSEPATSGSETPG | 601 |
| r10 | CAGGTACCTCTGAAAGCGCTACTCCGGAATCTGG | | TSESATPESGPGT | |
| | TCCAGGTACTTCTGAAAGCGCTACTCCGGAATCC | | SESATPESGPGST | |
| | GGTCCAGGTTCTACCAGCGAATCTCCTTCTGGCAC | | SESPSGTAPGSTS | |
| | CGCTCCAGGTTCTACTAGCGAATCCCCGTCTGGTA | | ESPSGTAPGTSPS | |
| | CCGCACCAGGTACTTCTCCTAGCGGCGAATCTTCT | | GESSTAPGASPGT | |
| | ACCGCACCAGGTGCATCTCCGGGTACTAGCTCTA | | SSTGSPGSSPSAS | |
| | CCGGTTCTCCAGGTTCTAGCCCTTCTGCTTCCACT | | TGTGPGSSTPSGA | |
| | GGTACCGGCCCAGGTAGCTCTACCCCGTCTGGTG | | TGSPGSSTPSGAT | |
| | CTACTGGTTCCCCAGGTAGCTCTACTCCGTCTGGT | | GSPGSSTPSGATG | |
| | GCAACCGGTTCCCCAGGTAGCTCTACTCCTTCTGG | | SPGASPGTSSTGS | |
| | TGCTACTGGCTCCCCAGGTGCATCCCCTGGCACCA | | P | |
| | GCTCTACCGGTTCTCCA | | | |
| LCW462_{—} | GGTGCTTCTCCGGGCACCAGCTCTACTGGTTCTCC | 569 | GASPGTSSTGSPG | 602 |
| r15 | AGGTTCTAGCCCTTCTGCATCCACCGGTACCGGTC | | SSPSASTGTGPGS | |
| | CAGGTAGCTCTACCCCTTCTGGTGCAACCGGCTCT | | STPSGATGSPGTS | |
| | CCAGGTACTTCTGAAAGCGCTACCCCGGAATCTG | | ESATPESGPGSEP | |
| | GCCCAGGTAGCGAACCGGCTACTTCTGGTTCTGA | | ATSGSETPGSEPA | |
| | AACCCCAGGTAGCGAACCGGCTACCTCCGGTTCT | | TSGSETPGTSESA | |
| | GAAACTCCAGGTACTTCTGAAAGCGCTACTCCGG | | TPESGPGTSTEPS | |
| | AGTCCGGTCCAGGTACCTCTACCGAACCGTCCGA | | EGSAPGTSTEPSE | |
| | AGGCAGCGCTCCAGGTACTTCTACTGAACCTTCTG | | GSAPGTSTEPSEG | |
| | AGGGTAGCGCTCCAGGTACCTCTACCGAACCGTC | | SAPGTSTEPSEGS | |
| | CGAGGGTAGCGCACCAGGTACCTCTACTGAACCG | | APGSEPATSGSET | |
| | TCTGAGGGTAGCGCTCCAGGTAGCGAACCGGCAA | | P | |
| | CCTCCGGTTCTGAAACTCCA | | | |
| LCW462_{—} | GGTACCTCTACCGAACCTTCCGAAGGTAGCGCTC | 570 | GTSTEPSEGSAPG | 603 |
| r16 | CAGGTAGCCCGGCAGGTTCTCCTACTTCCACTGA | | SPAGSPTSTEEGT | |
| | GGAAGGTACTTCTACCGAACCTTCTGAGGGTAGC | | STEPSEGSAPGTS | |
| | GCACCAGGTACCTCTGAAAGCGCAACTCCTGAGT | | ESATPESGPGSEP | |
| | CTGGCCCAGGTAGCGAACCTGCTACCTCCGGCTC | | ATSGSETPGTSES | |
| | TGAGACTCCAGGTACCTCTGAAAGCGCAACCCCG | | ATPESGPGSPAGS | |
| | GAATCTGGTCCAGGTAGCCCGGCTGGCTCTCCTA | | PTSTEEGTSESAT | |
| | CCTCTACTGAGGAAGGTACTTCTGAAAGCGCTAC | | PESGPGTSTEPSE | |
| | TCCTGAGTCTGGTCCAGGTACCTCTACTGAACCGT | | GSAPGSEPATSGS | |
| | CCGAAGGTAGCGCTCCAGGTAGCGAACCTGCTAC | | ETPGTSTEPSEGS | |
| | TTCTGGTTCTGAAACTCCAGGTACTTCTACCGAAC | | APGSEPATSGSET | |
| | CGTCCGAGGGTAGCGCTCCAGGTAGCGAACCTGC | | P | |
| | TACTTCTGGTTCTGAAACTCCA | | | |
| LCW462_{—} | GGTACTTCTACCGAACCGTCCGAAGGCAGCGCTC | 571 | GTSTEPSEGSAPG | 604 |
| r20 | CAGGTACCTCTACTGAACCTTCCGAGGGCAGCGC | | TSTEPSEGSAPGT | |
| | TCCAGGTACCTCTACCGAACCTTCTGAAGGTAGC | | STEPSEGSAPGTS | |
| | GCACCAGGTACTTCTACCGAACCGTCCGAAGGCA | | TEPSEGSAPGTST | |
| | GCGCTCCAGGTACCTCTACTGAACCTTCCGAGGG | | EPSEGSAPGTSTE | |
| | CAGCGCTCCAGGTACCTCTACCGAACCTTCTGAA | | PSEGSAPGTSTEP | |
| | GGTAGCGCACCAGGTACTTCTACCGAACCTTCCG | | SEGSAPGTSESAT | |
| | AGGGCAGCGCACCAGGTACTTCTGAAAGCGCTAC | | PESGPGTSESATP | |
| | CCCTGAGTCCGGCCCAGGTACTTCTGAAAGCGCT | | ESGPGTSTEPSEG | |
| | ACTCCTGAATCCGGTCCAGGTACTTCTACTGAACC | | SAPGSEPATSGSE | |
| | TTCCGAAGGTAGCGCTCCAGGTAGCGAACCTGCT | | TPGSPAGSPTSTE | |
| | ACTTCTGGTTCTGAAACCCCAGGTAGCCCGGCTG | | E | |
| | GCTCTCCGACCTCCACCGAGGAA | | | |
| LCW462_{—} | GGTACTTCTACCGAACCGTCCGAGGGCAGCGCTC | 572 | GTSTEPSEGSAPG | 605 |
| r23 | CAGGTACTTCTACTGAACCTTCTGAAGGCAGCGC | | TSTEPSEGSAPGT | |
| | TCCAGGTACTTCTACTGAACCTTCCGAAGGTAGC | | STEPSEGSAPGST | |
| | GCACCAGGTTCTACCAGCGAATCCCCTTCTGGTAC | | SESPSGTAPGSTS | |
| | TGCTCCAGGTTCTACCAGCGAATCCCCTTCTGGCA | | ESPSGTAPGTSTP | |
| | CCGCACCAGGTACTTCTACCCCTGAAAGCGGCTC | | ESGSASPGSEPAT | |
| | CGCTTCTCCAGGTAGCGAACCTGCAACCTCTGGCT | | SGSETPGTSESAT | |
| | CTGAAACCCCAGGTACCTCTGAAAGCGCTACTCC | | PESGPGTSTEPSE | |
| | TGAATCTGGCCCAGGTACTTCTACTGAACCGTCCG | | GSAPGTSTEPSEG | |
| | AGGGCAGCGCACCAGGTACTTCTACTGAACCGTC | | SAPGTSESATPES | |
| | TGAAGGTAGCGCACCAGGTACTTCTGAAAGCGCA | | GPGTSESATPESG | |
| | ACCCCGGAATCCGGCCCAGGTACCTCTGAAAGCG | | P | |
| | CAACCCCGGAGTCCGGCCCA | | | |
| LCW462_{—} | GGTAGCTCTACCCCTTCTGGTGCTACCGGCTCTCC | 573 | GSSTPSGATGSPG | 606 |
| r24 | AGGTTCTAGCCCGTCTGCTTCTACCGGTACCGGTC | | SSPSASTGTGPGS | |
| | CAGGTAGCTCTACCCCTTCTGGTGCTACTGGTTCT | | STPSGATGSPGSP | |
| | CCAGGTAGCCCTGCTGGCTCTCCGACTTCTACTGA | | AGSPTSTEEGSPA | |
| | GGAAGGTAGCCCGGCTGGTTCTCCGACTTCTACT | | GSPTSTEEGTSTE | |
| | GAGGAAGGTACTTCTACCGAACCTTCCGAAGGTA | | PSEGSAPGASPGT | |
| | GCGCTCCAGGTGCTTCCCCGGGCACTAGCTCTACC | | SSTGSPGSSPSAS | |
| | GGTTCTCCAGGTTCTAGCCCTTCTGCATCTACTGG | | TGTGPGTPGSGT | |
| | TACTGGCCCAGGTACTCCGGGCAGCGGTACTGCT | | ASSSPGSTSSTAE | |
| | TCTTCCTCTCCAGGTTCTACTAGCTCTACTGCTGA | | SPGPGTSPSGESS | |
| | ATCTCCTGGCCCAGGTACTTCTCCTAGCGGTGAAT | | TAPGTSTPESGSA | |
| | CTTCTACCGCTCCAGGTACCTCTACTCCGGAAAGC | | SP | |
| | GGTTCTGCATCTCCA | | | |
| LCW462_{—} | GGTACCTCTACTGAACCTTCTGAGGGCAGCGCTC | 574 | GTSTEPSEGSAPG | 607 |
| r27 | CAGGTACTTCTGAAAGCGCTACCCCGGAGTCCGG | | TSESATPESGPGT | |
| | TCCAGGTACTTCTACTGAACCGTCCGAAGGTAGC | | STEPSEGSAPGTS | |
| | GCACCAGGTACTTCTACTGAACCGTCTGAAGGTA | | TEPSEGSAPGTSE | |
| | GCGCACCAGGTACTTCTGAAAGCGCAACCCCGGA | | SATPESGPGTSES | |
| | ATCCGGCCCAGGTACCTCTGAAAGCGCAACCCCG | | ATPESGPGTPGSG | |
| | GAGTCCGGCCCAGGTACTCCTGGCAGCGGTACCG | | TASSSPGASPGTS | |
| | CTTCTTCTTCTCCAGGTGCTTCTCCTGGTACTAGCT | | STGSPGASPGTSS | |
| | CTACTGGTTCTCCAGGTGCTTCTCCGGGCACTAGC | | TGSPGSPAGSPTS | |
| | TCTACTGGTTCTCCAGGTAGCCCTGCTGGCTCTCC | | TEEGSPAGSPTST | |
| | GACTTCTACTGAGGAAGGTAGCCCGGCTGGTTCT | | EEGTSTEPSEGSA | |
| | CCGACTTCTACTGAGGAAGGTACTTCTACCGAAC | | P | |
| | CTTCCGAAGGTAGCGCTCCA | | | |
| LCW462_{—} | GGTAGCCCAGCAGGCTCTCCGACTTCCACTGAGG | 575 | GSPAGSPTSTEEG | 608 |
| r28 | AAGGTACTTCTACTGAACCTTCCGAAGGCAGCGC | | TSTEPSEGSAPGT | |
| | ACCAGGTACCTCTACTGAACCTTCTGAGGGCAGC | | STEPSEGSAPGTS | |
| | GCTCCAGGTACCTCTACCGAACCGTCTGAAGGTA | | TEPSEGSAPGTSE | |
| | GCGCACCAGGTACCTCTGAAAGCGCAACTCCTGA | | SATPESGPGTSES | |
| | GTCCGGTCCAGGTACTTCTGAAAGCGCAACCCCG | | ATPESGPGTPGSG | |
| | GAGTCTGGCCCAGGTACCCCGGGTAGCGGTACTG | | TASSSPGSSTPSG | |
| | CTTCTTCCTCTCCAGGTAGCTCTACCCCTTCTGGT | | ATGSPGASPGTSS | |
| | GCAACCGGCTCTCCAGGTGCTTCTCCGGGCACCA | | TGSPGTSTEPSEG | |
| | GCTCTACCGGTTCTCCAGGTACCTCTACTGAACCT | | SAPGTSESATPES | |
| | TCTGAGGGCAGCGCTCCAGGTACTTCTGAAAGCG | | GPGTSTEPSEGSA | |
| | CTACCCCGGAGTCCGGTCCAGGTACTTCTACTGA | | P | |
| | ACCGTCCGAAGGTAGCGCACCA | | | |
| LCW462_{—} | GGTAGCGAACCGGCAACCTCCGGCTCTGAAACTC | 576 | GSEPATSGSETPG | 609 |
| r38 | CAGGTACTTCTGAAAGCGCTACTCCGGAATCCGG | | TSESATPESGPGS | |
| | CCCAGGTAGCGAACCGGCTACTTCCGGCTCTGAA | | EPATSGSETPGSS | |
| | ACCCCAGGTAGCTCTACCCCGTCTGGTGCAACCG | | TPSGATGSPGTPG | |
| | GCTCCCCAGGTACTCCTGGTAGCGGTACCGCTTCT | | SGTASSSPGSSTP | |
| | TCTTCTCCAGGTAGCTCTACTCCGTCTGGTGCTAC | | SGATGSPGASPGT | |
| | CGGCTCCCCAGGTGCATCTCCTGGTACCAGCTCTA | | SSTGSPGSSTPSG | |
| | CCGGTTCTCCAGGTAGCTCTACTCCTTCTGGTGCT | | ATGSPGASPGTSS | |
| | ACTGGCTCTCCAGGTGCTTCCCCGGGTACCAGCTC | | TGSPGSEPATSGS | |
| | TACCGGTTCTCCAGGTAGCGAACCTGCTACTTCTG | | ETPGTSTEPSEGS | |
| | GTTCTGAAACTCCAGGTACTTCTACCGAACCGTCC | | APGSEPATSGSET | |
| | GAGGGTAGCGCTCCAGGTAGCGAACCTGCTACTT | | P | |
| | CTGGTTCTGAAACTCCA | | | |
| LCW462_{—} | GGTACCTCTACTGAACCTTCCGAAGGCAGCGCTC | 577 | GTSTEPSEGSAPG | 610 |
| r39 | CAGGTACCTCTACCGAACCGTCCGAGGGCAGCGC | | TSTEPSEGSAPGT | |
| | ACCAGGTACTTCTGAAAGCGCAACCCCTGAATCC | | SESATPESGPGSP | |
| | GGTCCAGGTAGCCCTGCTGGCTCTCCGACTTCTAC | | AGSPTSTEEGSPA | |
| | TGAGGAAGGTAGCCCGGCTGGTTCTCCGACTTCT | | GSPTSTEEGTSTE | |
| | ACTGAGGAAGGTACTTCTACCGAACCTTCCGAAG | | PSEGSAPGSPAGS | |
| | GTAGCGCTCCAGGTAGCCCGGCTGGTTCTCCGAC | | PTSTEEGTSTEPSE | |
| | TTCCACCGAGGAAGGTACCTCTACTGAACCTTCTG | | GSAPGTSTEPSEG | |
| | AGGGTAGCGCTCCAGGTACCTCTACTGAACCTTC | | SAPGASPGTSSTG | |
| | CGAAGGCAGCGCTCCAGGTGCTTCCCCGGGCACC | | SPGSSPSASTGTG | |
| | AGCTCTACTGGTTCTCCAGGTTCTAGCCCGTCTGC | | PGSSPSASTGTGP | |
| | TTCTACTGGTACTGGTCCAGGTTCTAGCCCTTCTG | | | |
| | CTTCCACTGGTACTGGTCCA | | | |
| LCW462_{—} | GGTAGCTCTACCCCGTCTGGTGCTACCGGTTCCCC | 578 | GSSTPSGATGSPG | 611 |
| r41 | AGGTGCTTCTCCTGGTACTAGCTCTACCGGTTCTC | | ASPGTSSTGSPGS | |
| | CAGGTAGCTCTACCCCGTCTGGTGCTACTGGCTCT | | STPSGATGSPGSP | |
| | CCAGGTAGCCCTGCTGGCTCTCCAACCTCCACCG | | AGSPTSTEEGTSE | |
| | AAGAAGGTACCTCTGAAAGCGCAACCCCTGAATC | | SATPESGPGSEPA | |
| | CGGCCCAGGTAGCGAACCGGCAACCTCCGGTTCT | | TSGSETPGASPGT | |
| | GAAACCCCAGGTGCATCTCCTGGTACTAGCTCTA | | SSTGSPGSSTPSG | |
| | CTGGTTCTCCAGGTAGCTCTACTCCGTCTGGTGCA | | ATGSPGSSPSAST | |
| | ACCGGCTCTCCAGGTTCTAGCCCTTCTGCATCTAC | | GTGPGSTSESPSG | |
| | CGGTACTGGTCCAGGTTCTACCAGCGAATCCCCTT | | TAPGSTSESPSGT | |
| | CTGGTACTGCTCCAGGTTCTACCAGCGAATCCCCT | | APGTSTPESGSAS | |
| | TCTGGCACCGCACCAGGTACTTCTACCCCTGAAA | | P | |
| | GCGGCTCCGCTTCTCCA | | | |
| LCW462_{—} | GGTTCTACCAGCGAATCTCCTTCTGGCACCGCTCC | 579 | GSTSESPSGTAPG | 612 |
| r42 | AGGTTCTACTAGCGAATCCCCGTCTGGTACCGCA | | STSESPSGTAPGT | |
| | CCAGGTACTTCTCCTAGCGGCGAATCTTCTACCGC | | SPSGESSTAPGTS | |
| | ACCAGGTACCTCTGAAAGCGCTACTCCGGAGTCT | | ESATPESGPGTST | |
| | GGCCCAGGTACCTCTACTGAACCGTCTGAGGGTA | | EPSEGSAPGTSTE | |
| | GCGCTCCAGGTACTTCTACTGAACCGTCCGAAGG | | PSEGSAPGTSTEP | |
| | TAGCGCACCAGGTACCTCTACTGAACCTTCTGAG | | SEGSAPGTSESAT | |
| | GGCAGCGCTCCAGGTACTTCTGAAAGCGCTACCC | | PESGPGTSTEPSE | |
| | CGGAGTCCGGTCCAGGTACTTCTACTGAACCGTC | | GSAPGSSTPSGAT | |
| | CGAAGGTAGCGCACCAGGTAGCTCTACCCCGTCT | | GSPGASPGTSSTG | |
| | GGTGCTACCGGTTCCCCAGGTGCTTCTCCTGGTAC | | SPGSSTPSGATGS | |
| | TAGCTCTACCGGTTCTCCAGGTAGCTCTACCCCGT | | P | |
| | CTGGTGCTACTGGCTCTCCA | | | |
| LCW462_{—} | GGTTCTACTAGCTCTACTGCAGAATCTCCGGGCCC | 580 | GSTSSTAESPGPG | 613 |
| r43 | AGGTACCTCTCCTAGCGGTGAATCTTCTACCGCTC | | TSPSGESSTAPGT | |
| | CAGGTACTTCTCCGAGCGGTGAATCTTCTACCGCT | | SPSGESSTAPGST | |
| | CCAGGTTCTACTAGCTCTACCGCTGAATCTCCGGG | | SSTAESPGPGSTS | |
| | TCCAGGTTCTACCAGCTCTACTGCAGAATCTCCTG | | STAESPGPGTSTP | |
| | GCCCAGGTACTTCTACTCCGGAAAGCGGTTCCGC | | ESGSASPGTSPSG | |
| | TTCTCCAGGTACTTCTCCTAGCGGTGAATCTTCTA | | ESSTAPGSTSSTA | |
| | CCGCTCCAGGTTCTACCAGCTCTACTGCTGAATCT | | ESPGPGTSTPESG | |
| | CCTGGCCCAGGTACTTCTACCCCGGAAAGCGGCT | | SASPGSTSSTAES | |
| | CCGCTTCTCCAGGTTCTACCAGCTCTACCGCTGAA | | PGPGSTSESPSGT | |
| | TCTCCTGGCCCAGGTTCTACTAGCGAATCTCCGTC | | APGTSPSGESSTA | |
| | TGGCACCGCACCAGGTACTTCCCCTAGCGGTGAA | | P | |
| | TCTTCTACTGCACCA | | | |
| LCW462_{—} | GGTACCTCTACTCCGGAAAGCGGTTCCGCATCTCC | 581 | GTSTPESGSASPG | 614 |
| r45 | AGGTTCTACCAGCGAATCCCCGTCTGGCACCGCA | | STSESPSGTAPGS | |
| | CCAGGTTCTACTAGCTCTACTGCTGAATCTCCGGG | | TSSTAESPGPGTS | |
| | CCCAGGTACCTCTACTGAACCTTCCGAAGGCAGC | | TEPSEGSAPGTST | |
| | GCTCCAGGTACCTCTACCGAACCGTCCGAGGGCA | | EPSEGSAPGTSES | |
| | GCGCACCAGGTACTTCTGAAAGCGCAACCCCTGA | | ATPESGPGTSESA | |
| | ATCCGGTCCAGGTACCTCTGAAAGCGCTACTCCG | | TPESGPGTSTEPS | |
| | GAGTCTGGCCCAGGTACCTCTACTGAACCGTCTG | | EGSAPGTSTEPSE | |
| | AGGGTAGCGCTCCAGGTACTTCTACTGAACCGTC | | GSAPGTSESATPE | |
| | CGAAGGTAGCGCACCAGGTACTTCTGAAAGCGCT | | SGPGTSTEPSEGS | |
| | ACTCCGGAGTCCGGTCCAGGTACCTCTACCGAAC | | APGTSTEPSEGSA | |
| | CGTCCGAAGGCAGCGCTCCAGGTACTTCTACTGA | | P | |
| | ACCTTCTGAGGGTAGCGCTCCC | | | |
| LCW462_{—} | GGTACCTCTACCGAACCGTCCGAGGGTAGCGCAC | 582 | GTSTEPSEGSAPG | 615 |
| r47 | CAGGTACCTCTACTGAACCGTCTGAGGGTAGCGC | | TSTEPSEGSAPGS | |
| | TCCAGGTAGCGAACCGGCAACCTCCGGTTCTGAA | | EPATSGSETPGTS | |
| | ACTCCAGGTACTTCTACTGAACCGTCTGAAGGTA | | TEPSEGSAPGTSE | |
| | GCGCACCAGGTACTTCTGAAAGCGCAACCCCGGA | | SATPESGPGTSES | |
| | ATCCGGCCCAGGTACCTCTGAAAGCGCAACCCCG | | ATPESGPGASPGT | |
| | GAGTCCGGCCCAGGTGCATCTCCGGGTACTAGCT | | SSTGSPGSSPSAS | |
| | CTACCGGTTCTCCAGGTTCTAGCCCTTCTGCTTCC | | TGTGPGSSTPSGA | |
| | ACTGGTACCGGCCCAGGTAGCTCTACCCCGTCTG | | TGSPGSSTPSGAT | |
| | GTGCTACTGGTTCCCCAGGTAGCTCTACTCCGTCT | | GSPGSSTPSGATG | |
| | GGTGCAACCGGTTCCCCAGGTAGCTCTACTCCTTC | | SPGASPGTSSTGS | |
| | TGGTGCTACTGGCTCCCCAGGTGCATCCCCTGGCA | | P | |
| | CCAGCTCTACCGGTTCTCCA | | | |
| LCW462_{—} | GGTAGCGAACCGGCAACCTCTGGCTCTGAAACTC | 583 | GSEPATSGSETPG | 616 |
| r54 | CAGGTAGCGAACCTGCAACCTCCGGCTCTGAAAC | | SEPATSGSETPGT | |
| | CCCAGGTACTTCTACTGAACCTTCTGAGGGCAGC | | STEPSEGSAPGSE | |
| | GCACCAGGTAGCGAACCTGCAACCTCTGGCTCTG | | PATSGSETPGTSE | |
| | AAACCCCAGGTACCTCTGAAAGCGCTACTCCTGA | | SATPESGPGTSTE | |
| | ATCTGGCCCAGGTACTTCTACTGAACCGTCCGAG | | PSEGSAPGSSTPS | |
| | GGCAGCGCACCAGGTAGCTCTACTCCGTCTGGTG | | GATGSPGSSTPSG | |
| | CTACCGGCTCTCCAGGTAGCTCTACCCCTTCTGGT | | ATGSPGASPGTSS | |
| | GCAACCGGCTCCCCAGGTGCTTCTCCGGGTACCA | | TGSPGSSTPSGAT | |
| | GCTCTACTGGTTCTCCAGGTAGCTCTACCCCGTCT | | GSPGASPGTSSTG | |
| | GGTGCTACCGGTTCCCCAGGTGCTTCTCCTGGTAC | | SPGSSTPSGATGS | |
| | TAGCTCTACCGGTTCTCCAGGTAGCTCTACCCCGT | | P | |
| | CTGGTGCTACTGGCTCTCCA | | | |
| LCW462_{—} | GGTACTTCTACCGAACCGTCCGAGGGCAGCGCTC | 584 | GTSTEPSEGSAPG | 617 |
| r55 | CAGGTACTTCTACTGAACCTTCTGAAGGCAGCGC | | TSTEPSEGSAPGT | |
| | TCCAGGTACTTCTACTGAACCTTCCGAAGGTAGC | | STEPSEGSAPGTS | |
| | GCACCAGGTACTTCTGAAAGCGCTACTCCGGAGT | | ESATPESGPGTST | |
| | CCGGTCCAGGTACCTCTACCGAACCGTCCGAAGG | | EPSEGSAPGTSTE | |
| | CAGCGCTCCAGGTACTTCTACTGAACCTTCTGAGG | | PSEGSAPGSTSES | |
| | GTAGCGCTCCAGGTTCTACTAGCGAATCTCCGTCT | | PSGTAPGTSPSGE | |
| | GGCACTGCTCCAGGTACTTCTCCTAGCGGTGAATC | | SSTAPGTSPSGES | |
| | TTCTACCGCTCCAGGTACTTCCCCTAGCGGCGAAT | | STAPGSPAGSPTS | |
| | CTTCTACCGCTCCAGGTAGCCCGGCTGGCTCTCCT | | TEEGTSESATPES | |
| | ACCTCTACTGAGGAAGGTACTTCTGAAAGCGCTA | | GPGTSTEPSEGSA | |
| | CTCCTGAGTCTGGTCCAGGTACCTCTACTGAACCG | | P | |
| | TCCGAAGGTAGCGCTCCA | | | |
| LCW462_{—} | GGTACTTCTACTGAACCTTCCGAAGGTAGCGCTCC | 585 | GTSTEPSEGSAPG | 618 |
| r57 | AGGTAGCGAACCTGCTACTTCTGGTTCTGAAACC | | SEPATSGSETPGS | |
| | CCAGGTAGCCCGGCTGGCTCTCCGACCTCCACCG | | PAGSPTSTEEGSP | |
| | AGGAAGGTAGCCCGGCAGGCTCTCCGACCTCTAC | | AGSPTSTEEGTSE | |
| | TGAGGAAGGTACTTCTGAAAGCGCAACCCCGGAG | | SATPESGPGTSTE | |
| | TCCGGCCCAGGTACCTCTACCGAACCGTCTGAGG | | PSEGSAPGTSTEP | |
| | GCAGCGCACCAGGTACCTCTACTGAACCTTCCGA | | SEGSAPGTSTEPS | |
| | AGGCAGCGCTCCAGGTACCTCTACCGAACCGTCC | | EGSAPGTSESATP | |
| | GAGGGCAGCGCACCAGGTACTTCTGAAAGCGCAA | | ESGPGSSTPSGAT | |
| | CCCCTGAATCCGGTCCAGGTAGCTCTACTCCGTCT | | GSPGSSPSASTGT | |
| | GGTGCAACCGGCTCCCCAGGTTCTAGCCCGTCTG | | GPGASPGTSSTGS | |
| | CTTCCACTGGTACTGGCCCAGGTGCTTCCCCGGGC | | P | |
| | ACCAGCTCTACTGGTTCTCCA | | | |
| LCW462_{—} | GGTAGCGAACCGGCTACTTCCGGCTCTGAGACTC | 586 | GSEPATSGSETPG | 619 |
| r61 | CAGGTAGCCCTGCTGGCTCTCCGACCTCTACCGA | | SPAGSPTSTEEGT | |
| | AGAAGGTACCTCTGAAAGCGCTACCCCTGAGTCT | | SESATPESGPGTS | |
| | GGCCCAGGTACCTCTACTGAACCTTCCGAAGGCA | | TEPSEGSAPGTST | |
| | GCGCTCCAGGTACCTCTACCGAACCGTCCGAGGG | | EPSEGSAPGTSES | |
| | CAGCGCACCAGGTACTTCTGAAAGCGCAACCCCT | | ATPESGPGTSTPE | |
| | GAATCCGGTCCAGGTACCTCTACTCCGGAAAGCG | | SGSASPGSTSESP | |
| | GTTCCGCATCTCCAGGTTCTACCAGCGAATCCCCG | | SGTAPGSTSSTAE | |
| | TCTGGCACCGCACCAGGTTCTACTAGCTCTACTGC | | SPGPGTSESATPE | |
| | TGAATCTCCGGGCCCAGGTACTTCTGAAAGCGCT | | SGPGTSTEPSEGS | |
| | ACTCCGGAGTCCGGTCCAGGTACCTCTACCGAAC | | APGTSTEPSEGSA | |
| | CGTCCGAAGGCAGCGCTCCAGGTACTTCTACTGA | | P | |
| | ACCTTCTGAGGGTAGCGCTCCA | | | |
| LCW462_{—} | GGTACTTCTACCGAACCGTCCGAGGGCAGCGCTC | 587 | GTSTEPSEGSAPG | 620 |
| r64 | CAGGTACTTCTACTGAACCTTCTGAAGGCAGCGC | | TSTEPSEGSAPGT | |
| | TCCAGGTACTTCTACTGAACCTTCCGAAGGTAGC | | STEPSEGSAPGTS | |
| | GCACCAGGTACCTCTACCGAACCGTCTGAAGGTA | | TEPSEGSAPGTSE | |
| | GCGCACCAGGTACCTCTGAAAGCGCAACTCCTGA | | SATPESGPGTSES | |
| | GTCCGGTCCAGGTACTTCTGAAAGCGCAACCCCG | | ATPESGPGTPGSG | |
| | GAGTCTGGCCCAGGTACTCCTGGCAGCGGTACCG | | TASSSPGSSTPSG | |
| | CATCTTCCTCTCCAGGTAGCTCTACTCCGTCTGGT | | ATGSPGASPGTSS | |
| | GCAACTGGTTCCCCAGGTGCTTCTCCGGGTACCA | | TGSPGSTSSTAES | |
| | GCTCTACCGGTTCTCCAGGTTCCACCAGCTCTACT | | PGPGTSPSGESST | |
| | GCTGAATCTCCTGGTCCAGGTACCTCTCCTAGCGG | | APGTSTPESGSAS | |
| | TGAATCTTCTACTGCTCCAGGTACTTCTACTCCTG | | P | |
| | AAAGCGGCTCTGCTTCTCCA | | | |
| LCW462_{—} | GGTAGCCCGGCAGGCTCTCCGACCTCTACTGAGG | 588 | GSPAGSPTSTEEG | 621 |
| r67 | AAGGTACTTCTGAAAGCGCAACCCCGGAGTCCGG | | TSESATPESGPGT | |
| | CCCAGGTACCTCTACCGAACCGTCTGAGGGCAGC | | STEPSEGSAPGTS | |
| | GCACCAGGTACTTCTGAAAGCGCAACCCCTGAAT | | ESATPESGPGSEP | |
| | CCGGTCCAGGTAGCGAACCGGCTACTTCTGGCTC | | ATSGSETPGTSTE | |
| | TGAGACTCCAGGTACTTCTACCGAACCGTCCGAA | | PSEGSAPGSPAGS | |
| | GGTAGCGCACCAGGTAGCCCGGCTGGTTCTCCGA | | PTSTEEGTSTEPSE | |
| | CTTCCACCGAGGAAGGTACCTCTACTGAACCTTCT | | GSAPGTSTEPSEG | |
| | GAGGGTAGCGCTCCAGGTACCTCTACTGAACCTT | | SAPGTSTEPSEGS | |
| | CCGAAGGCAGCGCTCCAGGTACTTCTACCGAACC | | APGTSTEPSEGSA | |
| | GTCCGAGGGCAGCGCTCCAGGTACTTCTACTGAA | | PGTSTEPSEGSAP | |
| | CCTTCTGAAGGCAGCGCTCCAGGTACTTCTACTGA | | | |
| | ACCTTCCGAAGGTAGCGCACCA | | | |
| LCW462_{—} | GGTACTTCTCCGAGCGGTGAATCTTCTACCGCACC | 589 | GTSPSGESSTAPG | 622 |
| r69 | AGGTTCTACTAGCTCTACCGCTGAATCTCCGGGCC | | STSSTAESPGPGT | |
| | CAGGTACTTCTCCGAGCGGTGAATCTTCTACTGCT | | SPSGESSTAPGTS | |
| | CCAGGTACCTCTGAAAGCGCTACTCCGGAGTCTG | | ESATPESGPGTST | |
| | GCCCAGGTACCTCTACTGAACCGTCTGAGGGTAG | | EPSEGSAPGTSTE | |
| | CGCTCCAGGTACTTCTACTGAACCGTCCGAAGGT | | PSEGSAPGSSPSA | |
| | AGCGCACCAGGTTCTAGCCCTTCTGCATCTACTGG | | STGTGPGSSTPSG | |
| | TACTGGCCCAGGTAGCTCTACTCCTTCTGGTGCTA | | ATGSPGASPGTSS | |
| | CCGGCTCTCCAGGTGCTTCTCCGGGTACTAGCTCT | | TGSPGTSTPESGS | |
| | ACCGGTTCTCCAGGTACTTCTACTCCGGAAAGCG | | ASPGTSPSGESST | |
| | GTTCCGCATCTCCAGGTACTTCTCCTAGCGGTGAA | | APGTSPSGESSTA | |
| | TCTTCTACTGCTCCAGGTACCTCTCCTAGCGGCGA | | P | |
| | ATCTTCTACTGCTCCA | | | |
| LCW462_{—} | GGTACCTCTGAAAGCGCTACTCCGGAGTCTGGCC | 590 | GTSESATPESGPG | 623 |
| r70 | CAGGTACCTCTACTGAACCGTCTGAGGGTAGCGC | | TSTEPSEGSAPGT | |
| | TCCAGGTACTTCTACTGAACCGTCCGAAGGTAGC | | STEPSEGSAPGSP | |
| | GCACCAGGTAGCCCTGCTGGCTCTCCGACTTCTAC | | AGSPTSTEEGSPA | |
| | TGAGGAAGGTAGCCCGGCTGGTTCTCCGACTTCT | | GSPTSTEEGTSTE | |
| | ACTGAGGAAGGTACTTCTACCGAACCTTCCGAAG | | PSEGSAPGSSPSA | |
| | GTAGCGCTCCAGGTTCTAGCCCTTCTGCTTCCACC | | STGTGPGSSTPSG | |
| | GGTACTGGCCCAGGTAGCTCTACCCCTTCTGGTGC | | ATGSPGSSTPSGA | |
| | TACCGGCTCCCCAGGTAGCTCTACTCCTTCTGGTG | | TGSPGSEPATSGS | |
| | CAACTGGCTCTCCAGGTAGCGAACCGGCAACTTC | | ETPGTSESATPES | |
| | CGGCTCTGAAACCCCAGGTACTTCTGAAAGCGCT | | GPGSEPATSGSET | |
| | ACTCCTGAGTCTGGCCCAGGTAGCGAACCTGCTA | | P | |
| | CCTCTGGCTCTGAAACCCCA | | | |
| LCW462_{—} | GGTACTTCTACCGAACCGTCCGAAGGCAGCGCTC | 591 | GTSTEPSEGSAPG | 624 |
| r72 | CAGGTACCTCTACTGAACCTTCCGAGGGCAGCGC | | TSTEPSEGSAPGT | |
| | TCCAGGTACCTCTACCGAACCTTCTGAAGGTAGC | | STEPSEGSAPGSS | |
| | GCACCAGGTAGCTCTACCCCGTCTGGTGCTACCG | | TPSGATGSPGASP | |
| | GTTCCCCAGGTGCTTCTCCTGGTACTAGCTCTACC | | GTSSTGSPGSSTP | |
| | GGTTCTCCAGGTAGCTCTACCCCGTCTGGTGCTAC | | SGATGSPGTSESA | |
| | TGGCTCTCCAGGTACTTCTGAAAGCGCAACCCCT | | TPESGPGSEPATS | |
| | GAATCCGGTCCAGGTAGCGAACCGGCTACTTCTG | | GSETPGTSTEPSE | |
| | GCTCTGAGACTCCAGGTACTTCTACCGAACCGTCC | | GSAPGSTSESPSG | |
| | GAAGGTAGCGCACCAGGTTCTACTAGCGAATCTC | | TAPGSTSESPSGT | |
| | CTTCTGGCACTGCACCAGGTTCTACCAGCGAATCT | | APGTSTPESGSAS | |
| | CCGTCTGGCACTGCACCAGGTACCTCTACCCCTGA | | P | |
| | AAGCGGTTCCGCTTCTCCA | | | |
| LCW462_{—} | GGTACCTCTACTCCTGAAAGCGGTTCTGCATCTCC | 592 | GTSTPESGSASPG | 625 |
| r73 | AGGTTCCACTAGCTCTACCGCAGAATCTCCGGGC | | STSSTAESPGPGS | |
| | CCAGGTTCTACTAGCTCTACTGCTGAATCTCCTGG | | TSSTAESPGPGSS | |
| | CCCAGGTTCTAGCCCTTCTGCATCTACTGGTACTG | | PSASTGTGPGSST | |
| | GCCCAGGTAGCTCTACTCCTTCTGGTGCTACCGGC | | PSGATGSPGASPG | |
| | TCTCCAGGTGCTTCTCCGGGTACTAGCTCTACCGG | | TSSTGSPGSEPAT | |
| | TTCTCCAGGTAGCGAACCGGCAACCTCCGGCTCT | | SGSETPGTSESAT | |
| | GAAACCCCAGGTACCTCTGAAAGCGCTACTCCTG | | PESGPGSPAGSPT | |
| | AATCCGGCCCAGGTAGCCCGGCAGGTTCTCCGAC | | STEEGSTSESPSG | |
| | TTCCACTGAGGAAGGTTCTACTAGCGAATCTCCTT | | TAPGSTSESPSGT | |
| | CTGGCACTGCACCAGGTTCTACCAGCGAATCTCC | | APGTSTPESGSAS | |
| | GTCTGGCACTGCACCAGGTACCTCTACCCCTGAA | | P | |
| | AGCGGTTCCGCTTCTCCC | | | |
| LCW462_{—} | GGTAGCCCGGCTGGCTCTCCTACCTCTACTGAGG | 593 | GSPAGSPTSTEEG | 626 |
| r78 | AAGGTACTTCTGAAAGCGCTACTCCTGAGTCTGG | | TSESATPESGPGT | |
| | TCCAGGTACCTCTACTGAACCGTCCGAAGGTAGC | | STEPSEGSAPGST | |
| | GCTCCAGGTTCTACCAGCGAATCTCCTTCTGGCAC | | SESPSGTAPGSTS | |
| | CGCTCCAGGTTCTACTAGCGAATCCCCGTCTGGTA | | ESPSGTAPGTSPS | |
| | CCGCACCAGGTACTTCTCCTAGCGGCGAATCTTCT | | GESSTAPGTSTEP | |
| | ACCGCACCAGGTACCTCTACCGAACCTTCCGAAG | | SEGSAPGSPAGSP | |
| | GTAGCGCTCCAGGTAGCCCGGCAGGTTCTCCTAC | | TSTEEGTSTEPSE | |
| | TTCCACTGAGGAAGGTACTTCTACCGAACCTTCTG | | GSAPGSEPATSGS | |
| | AGGGTAGCGCACCAGGTAGCGAACCTGCAACCTC | | ETPGTSESATPES | |
| | TGGCTCTGAAACCCCAGGTACCTCTGAAAGCGCT | | GPGTSTEPSEGSA | |
| | ACTCCTGAATCTGGCCCAGGTACTTCTACTGAACC | | P | |
| | GTCCGAGGGCAGCGCACCA | | | |
| LCW462_{—} | GGTACCTCTACCGAACCTTCCGAAGGTAGCGCTC | 594 | GTSTEPSEGSAPG | 627 |
| r79 | CAGGTAGCCCGGCAGGTTCTCCTACTTCCACTGA | | SPAGSPTSTEEGT | |
| | GGAAGGTACTTCTACCGAACCTTCTGAGGGTAGC | | STEPSEGSAPGTS | |
| | GCACCAGGTACCTCCCCTAGCGGCGAATCTTCTA | | PSGESSTAPGTSP | |
| | CTGCTCCAGGTACCTCTCCTAGCGGCGAATCTTCT | | SGESSTAPGTSPS | |
| | ACCGCTCCAGGTACCTCCCCTAGCGGTGAATCTTC | | GESSTAPGSTSES | |
| | TACCGCACCAGGTTCTACCAGCGAATCCCCTTCTG | | PSGTAPGSTSESP | |
| | GTACTGCTCCAGGTTCTACCAGCGAATCCCCTTCT | | SGTAPGTSTPESG | |
| | GGCACCGCACCAGGTACTTCTACCCCTGAAAGCG | | SASPGSEPATSGS | |
| | GCTCCGCTTCTCCAGGTAGCGAACCTGCAACCTCT | | ETPGTSESATPES | |
| | GGCTCTGAAACCCCAGGTACCTCTGAAAGCGCTA | | GPGTSTEPSEGSA | |
| | CTCCTGAATCTGGCCCAGGTACTTCTACTGAACCG | | P | |
| | TCCGAGGGCAGCGCACCA | | | |
| LCW462_{—} | GGTAGCGAACCGGCAACCTCTGGCTCTGAAACCC | 595 | GSEPATSGSETPG | 628 |
| r87 | CAGGTACCTCTGAAAGCGCTACTCCGGAATCTGG | | TSESATPESGPGT | |
| | TCCAGGTACTTCTGAAAGCGCTACTCCGGAATCC | | SESATPESGPGTS | |
| | GGTCCAGGTACTTCTCCGAGCGGTGAATCTTCTAC | | PSGESSTAPGSTS | |
| | CGCACCAGGTTCTACTAGCTCTACCGCTGAATCTC | | STAESPGPGTSPS | |
| | CGGGCCCAGGTACTTCTCCGAGCGGTGAATCTTCT | | GESSTAPGSTSES | |
| | ACTGCTCCAGGTTCTACTAGCGAATCCCCGTCTGG | | PSGTAPGTSPSGE | |
| | TACTGCTCCAGGTACTTCCCCTAGCGGTGAATCTT | | SSTAPGSTSSTAE | |
| | CTACTGCTCCAGGTTCTACCAGCTCTACCGCAGAA | | SPGPGSSTPSGAT | |
| | TCTCCGGGTCCAGGTAGCTCTACTCCGTCTGGTGC | | GSPGSSTPSGATG | |
| | AACCGGTTCCCCAGGTAGCTCTACCCCTTCTGGTG | | SPGSSTPSGANW | |
| | CAACCGGCTCCCCAGGTAGCTCTACCCCTTCTGGT | | LS | |
| | GCAAACTGGCTCTCC | | | |
| LCW462_{—} | GGTAGCCCTGCTGGCTCTCCGACTTCTACTGAGGA | 596 | GSPAGSPTSTEEG | 629 |
| r88 | AGGTAGCCCGGCTGGTTCTCCGACTTCTACTGAG | | SPAGSPTSTEEGT | |
| | GAAGGTACTTCTACCGAACCTTCCGAAGGTAGCG | | STEPSEGSAPGTS | |
| | CTCCAGGTACCTCTACTGAACCTTCCGAAGGCAG | | TEPSEGSAPGTST | |
| | CGCTCCAGGTACCTCTACCGAACCGTCCGAGGGC | | EPSEGSAPGTSES | |
| | AGCGCACCAGGTACTTCTGAAAGCGCAACCCCTG | | ATPESGPGASPGT | |
| | AATCCGGTCCAGGTGCATCTCCTGGTACCAGCTCT | | SSTGSPGSSTPSG | |
| | ACCGGTTCTCCAGGTAGCTCTACTCCTTCTGGTGC | | ATGSPGASPGTSS | |
| | TACTGGCTCTCCAGGTGCTTCCCCGGGTACCAGCT | | TGSPGSSTPSGAT | |
| | CTACCGGTTCTCCAGGTAGCTCTACCCCGTCTGGT | | GSPGTPGSGTASS | |
| | GCTACTGGTTCTCCAGGTACTCCGGGCAGCGGTA | | SPGSSTPSGATGS | |
| | CTGCTTCTTCCTCTCCAGGTAGCTCTACCCCTTCT | | P | |
| | GGTGCTACTGGCTCTCCA | | | |
| LCW462_{—} | GGTAGCTCTACCCCGTCTGGTGCTACTGGTTCTCC | 597 | GSSTPSGATGSPG | 630 |
| r89 | AGGTACTCCGGGCAGCGGTACTGCTTCTTCCTCTC | | TPGSGTASSSPGS | |
| | CAGGTAGCTCTACCCCTTCTGGTGCTACTGGCTCT | | STPSGATGSPGSP | |
| | CCAGGTAGCCCGGCTGGCTCTCCTACCTCTACTGA | | AGSPTSTEEGTSE | |
| | GGAAGGTACTTCTGAAAGCGCTACTCCTGAGTCT | | SATPESGPGTSTE | |
| | GGTCCAGGTACCTCTACTGAACCGTCCGAAGGTA | | PSEGSAPGTSESA | |
| | GCGCTCCAGGTACCTCTGAAAGCGCAACTCCTGA | | TPESGPGSEPATS | |
| | GTCTGGCCCAGGTAGCGAACCTGCTACCTCCGGC | | GSETPGTSESATP | |
| | TCTGAGACTCCAGGTACCTCTGAAAGCGCAACCC | | ESGPGTSTEPSEG | |
| | CGGAATCTGGTCCAGGTACTTCTACTGAACCGTCT | | SAPGTSESATPES | |
| | GAAGGTAGCGCACCAGGTACTTCTGAAAGCGCAA | | GPGTSESATPESG | |
| | CCCCGGAATCCGGCCCAGGTACCTCTGAAAGCGC | | P | |
| | AACCCCGGAGTCCGGCCCA | | | |

### Example 7

### Construction of XTEN_AM288

[0333] The entire library LCW0462 was dimerized as described in Example 6 resulting in a library of XTEN_AM288 clones designated LCW0463. 1512 isolates from library LCW0463 were screened using the protocol described in Example 6. 176 highly expressing clones were sequenced and 40 preferred XTEN_AM288 segments were chosen for the construction of multifunctional proteins that contain multiple XTEN segments.

### Example 8

### Construction of XTEN_AM432

[0334] We generated a library of XTEN_AM432 segments by recombining segments from library LCW0462 of XTEN_AM144 segments and segments from library LCW0463 of XTEN_AM288 segments. This new library of XTEN_AM432 segment was designated LCW0464. Plasmid was isolated from cultures of E. coli harboring LCW0462 and LCW0463, respectively. 1512 isolates from library LCW0464 were screened using the protocol described in Example 6. 176 highly expressing clones were sequenced and 39 preferred XTEN_AM432 segment were chosen for the construction of longer XTENs and for the construction of multifunctional proteins that contain multiple XTEN segments.

[0335] In parallel we constructed library LMS0100 of XTEN_AM432 segments using preferred segments of XTEN_AM144 and XTEN_AM288. Screening this library yielded 4 isolates that were selected for further construction

### Example 9

### Construction of XTEN_AM875

[0336] The stuffer vector pCW0359 was digested with BsaI and KpnI to remove the stuffer segment and the resulting vector fragment was isolated by agarose gel purification.

[0337] We annealed the phosphorylated oligonucleotide BsaI-AscI-KpnIforP: AGGTGCAAGCGCAAGCGGCGCGCCAAGCACGGGAGGTTCGTCTTCACTCGAGGGTAC (SEQ ID NO: 631) and the non-phosphorylated oligonucleotide BsaI-AscI-KpnIrev: CCTCGAGTGAAGACGAACCTCCCGTGCTTGGCGCGCCGCTTGCGCTTGC (SEQ ID NO: 632) for introducing the sequencing island A (SI-A) which encodes amino acids GASASGAPSTG (SEQ ID NO: 633) and has the restriction enzyme AscI recognition nucleotide sequence GGCGCGCC inside. The annealed oligonucleotide pairs were ligated with BsaI and KpnI digested stuffer vector pCW0359 prepared above to yield pCW0466 containing SI-A. We then generated a library of XTEN_AM443 segments by recombining 43 preferred XTEN_AM432 segments from Example 8 and SI-A segments from pCW0466 at C-terminus using the same dimerization process described in Example 5. This new library of XTEN_AM443 segments was designated LCW0479.

[0338] We generated a library of XTEN_AM875 segments by recombining segments from library LCW0479 of XTEN_AM443 segments and 43 preferred XTEN_AM432 segments from Example 8 using the same dimerization process described in example 5. This new library of XTEN_AM875 segment was designated LCW0481.

### Example 10

### Construction of XTEN_AM1318

[0339] We annealed the phosphorylated oligonucleotide BsaI-FseI-KpnIforP:

(SEQ ID NO: 634)
AGGTCCAGAACCAACGGGGCCGGCCCCAAGCGGAGGTTCGTCTTCACTC
GAGGGTAC

and the non-phosphorylated oligonucleotide BsaI-FseI-KpnIrev:

(SEQ ID NO: 635)
CCTCGAGTGAAGACGAACCTCCGCTTGGGGCCGGCCCCGTTGGTTCTGG

the sequencing island B (SI-B) which encodes amino acids GPEPTGPAPSG (SEQ ID NO: 636) and has the restriction enzyme FseI recognition nucleotide sequence GGCCGGCC inside. The annealed oligonucleotide pairs were ligated with BsaI and KpnI digested stuffier vector pCW0359 as used in Example 9 to yield pCW0467 containing SI-B. We then generated a library of XTEN_AM443 segments by recombining 43 preferred XTEN_AM432 segments from Example 8 and SI-B segments from pCW0467 at C-terminus using the same dimerization process described in example 5. This new library of XTEN_AM443 segments was designated LCW0480.

[0340] We generated a library of XTEN_AM1318 segments by recombining segments from library LCW0480 of XTEN_AM443 segments and segments from library LCW0481 of XTEN_AM875 segments using the same dimerization process as in example 5. This new library of XTEN_AM1318 segment was designated LCW0487.

### Example 11

### Construction of XTEN_AD864

[0341] Using the several consecutive rounds of dimerization, we assembled a collection of XTEN_AD864 sequences starting from segments of XTEN_AD36 listed in Example 1. These sequences were assembled as described in Example 5. Several isolates from XTEN_AD864 were evaluated and found to show good expression and excellent solubility under physiological conditions. One intermediate construct of XTEN_AD576 was sequenced. This clone was evaluated in a PK experiment in cynomolgus monkeys and a half-life of about 20 h was measured.

### Example 12

### Construction of XTEN_AF864

[0342] Using the several consecutive rounds of dimerization, we assembled a collection of XTEN_AF864 sequences starting from segments of XTEN_AF36 listed in Example 3. These sequences were assembled as described in Example 5. Several isolates from XTEN_AF864 were evaluated and found to show good expression and excellent solubility under physiological conditions. One intermediate construct of XTEN_AF540 was sequenced. This clone was evaluated in a PK experiment in cynomolgus monkeys and a half-life of about 20 h was measured. A full length clone of XTEN_AF864 had excellent solubility and showed half-life exceeding 60 h in cynomolgus monkeys. A second set of XTEN_AF sequences was assembled including a sequencing island as described in Example 9.

### Example 13

### Construction of XTEN_AG864

[0343] Using the several consecutive rounds of dimerization, we assembled a collection of XTEN_AG864 sequences starting from segments of XTEN_AG36 listed in Example 4. These sequences were assembled as described in Example 5. Several isolates from XTEN_AG864 were evaluated and found to show good expression and excellent solubility under physiological conditions. A full length clone of XTEN_AG864 had excellent solubility and showed half-life exceeding 60 h in cynomolgus monkeys.

### Example 14

### Construction of N-Terminal Extensions of XTEN-Construction and Screening of 12Mer Addition Libraries

[0344] This example details a step in the optimization of the N-terminus of the XTEN protein to promote the initiation of translation to allow for expression of XTEN fusions at the N-terminus of fusion proteins without the presence of a helper domain. Historically expression of proteins with XTEN at the N-terminus was poor, yielding values that would essentially undetectable in the GFP fluorescence assay (<25% of the expression with the N-terminal CBD helper domain). To create diversity at the codon level, seven amino acid sequences were selected and prepared with a diversity of codons. Seven pairs of oligonucleotides encoding 12 amino acids with codon diversities were designed, annealed and ligated into the NdeI/BsaI restriction enzyme digested stuffer vector pCW0551 (Stuffer-XTEN_AM875-GFP), and transformed into E. coli BL21Gold(DE3) competent cells to obtain colonies of seven libraries. The resulting clones have N-terminal XTEN 12mers fused in-frame to XTEN_AM875-GFP to allow use of GFP fluorescence for screening the expression. Individual colonies from the seven created libraries were picked and grown overnight to saturation in 500 μl of super broth media in a 96 deep well plate. The number of colonies picked ranged from approximately half to a third of the theoretical diversity of the library (see Table 14).

TABLE 14
Theoretical Diversity and Sampling Numbers for 12mer Addition Libraries.
The amino acid residues with randomized codons are underlined.

| | | | SEQ ID | Theoretical | Number |
|---|---|---|---|---|---|
| Library | Motif Family | Amino Acid Sequence | NO: | Diversity | screened |
| LCW546 | AE12 | MASPAGSPTSTEE | 637 | 572 | 2 plates (168) |
| LCW547 | AE12 | MATSESATPESGP | 638 | 1536 | 5 plates (420) |
| LCW548 | AF12 | MATSPSGESSTAP | 639 | 192 | 2 plates (168) |
| LCW549 | AF12 | MESTSSTAESPGP | 640 | 384 | 2 plates (168) |
| LCW552 | AG12 | MASSTPSGATGSP | 641 | 384 | 2 plates (168) |
| LCW553 | AG12 | MEASPGTSSTGSP | 642 | 384 | 2 plates (168) |
| LCW554 | (CBD-like) | MASTPESGSSG | 643 | 32 | 1 plate (84) |

[0345] The saturated overnight cultures were used to inoculate fresh 500 μl cultures in auto-induction media in which they were grown overnight at 26° C. These expression cultures were then assayed using a fluorescence plate reader (excitation 395 nm, emission 510 nm) to determine the amount of GFP reporter present (see FIG. 28 for results of expression assays). The results indicated that while median expression levels were approximately half of the expression levels compared to the “benchmark” CBD N-terminal helper domain, the best clones from the libraries were much closer to the benchmarks, indicating that further optimization around those sequences was warranted. This is in contrast to previous XTEN versions that were <25% of the expression levels of the CBD N-terminal benchmark. The results also show that the libraries starting with amino acids MA had better expression levels than those beginning with ME. This was most apparent when looking at the best clones, which were closer to the benchmarks as they mostly start with MA. Of the 176 clones within 33% of the CBD-AM875 benchmark, 87% begin with MA, where as only 75% of the sequences in the libraries beginning with MA, a clear over representation of the clones beginning with MA at the highest level of expression. 96 of the best clones were sequenced to confirm identity and twelve sequences (see Table 15), 4 from LCW546, 4 from LCW547 and 4 from LCW552 were selected for further optimization.

TABLE 15
Advanced 12mer DNA Nucleotide Sequences

| | | SEQ ID |
|---|---|---|
| Clone | DNA NucleotideSequence | NO: |
| LCW546_02 | ATGGCTAGTCCGGCTGGCTCTCCGACCTCCACTGAGGAAGGTACTTCTACT | 644 |
| LCW546_06 | ATGGCTAGTCCTGCTGGCTCTCCAACCTCCACTGAGGAAGGTACTTCTACT | 645 |
| LCW546_07 | ATGGCTAGTCCAGCAGGCTCTCCTACCTCCACCGAGGAAGGTACTTCTACT | 646 |
| LCW546_09 | ATGGCTAGTCCTGCTGGCTCTCCGACCTCTACTGAGGAAGGTACTTCTACT | 647 |
| LCW547_03 | ATGGCTACATCCGAAAGCGCAACCCCTGAGTCCGGTCCAGGTACTTCTACT | 648 |
| LCW547_06 | ATGGCTACATCCGAAAGCGCAACCCCTGAATCTGGTCCAGGTACTTCTACT | 649 |
| LCW547_10 | ATGGCTACGTCTGAAAGCGCTACTCCGGAATCTGGTCCAGGTACTTCTACT | 650 |
| LCW547_17 | ATGGCTACGTCCGAAAGCGCTACCCCTGAATCCGGTCCAGGTACTTCTACT | 651 |
| LCW552_03 | ATGGCTAGTTCTACCCCGTCTGGTGCAACCGGTTCCCCAGGTACTTCTACT | 652 |
| LCW552_05 | ATGGCTAGCTCCACTCCGTCTGGTGCTACCGGTTCCCCAGGTACTTCTACT | 653 |
| LCW552_10 | ATGGCTAGCTCTACTCCGTCTGGTGCTACTGGTTCCCCAGGTACTTCTACT | 654 |
| LCW552_11 | ATGGCTAGTTCTACCCCTTCTGGTGCTACTGGTTCTCCAGGTACTTCTACT | 655 |

### Example 15

### Construction of N-Terminal Extensions of XTEN-Construction and Screening of Libraries Optimizing Codons 3 and 4

[0346] This example details a step in the optimization of the N-terminus of the XTEN protein to promote the initiation of translation to allow for expression of XTEN fusions at the N-terminus of proteins without the presence of a helper domain. With preferences for the first two codons established (see Example supra), the third and fourth codons were randomized to determine preferences. Three libraries, based upon best clones from LCW546, LCW547 and LCW552, were designed with the third and fourth residues modified such that all combinations of allowable XTEN codons were present at these positions. In order to include all the allowable XTEN codons for each library, nine pairs of oligonucleotides encoding 12 amino acids with codon diversities of third and fourth residues were designed, annealed and ligated into the NdeI/BsaI restriction enzyme digested stuffer vector pCW0551 (Stuffer-XTEN_AM875-GFP), and transformed into E. coli BL21Gold(DE3) competent cells to obtain colonies of three libraries LCW0569-571. With 24 XTEN codons the theoretical diversity of each library is 576 unique clones. A total of 504 individual colonies from the three created libraries were picked and grown overnight to saturation in 500 μl of super broth media in a 96 deep well plate. This provided sufficient coverage to understand relative library performance and sequence preferences. The saturated overnight cultures were used to inoculate new 500 μl cultures in auto-induction media in which were grown overnight at 26° C. These expression cultures were then assayed using a fluorescence plate reader (excitation 395 nm, emission 510 nm) to determine the amount of GFP reporter present. The top 75 clones from the screen were sequenced and retested for GFP reporter expression versus the benchmark samples. 52 clones yielded usable sequencing data and were used for subsequent analysis. The results were broken down by library and indicate that LCW546 was the superior library. The results are presented in Table 16.

TABLE 16
Third and Fourth Codon Optimization Library Comparison

| | LCW569 | LCW570 | LCW571 |
|---|---|---|---|
| N | 21 | 15 | 16 |
| Mean Fluorescence (AU) | 628 | 491 | 537 |
| SD | 173 | 71 | 232 |
| CV | 28% | 15% | 43% |

[0347] Further trends were seen in the data showing preferences for particular codons at the third and fourth position. Within the LCW569 library the glutamate codon GAA at the third position and the threonine codon ACT were associated with higher expression as seen in Table 17.

TABLE 17
Preferred Third and Fourth Codons in LCW569

| | 3 = GAA | Rest | 4 = ACT | Rest |
|---|---|---|---|---|
| N | 8 | 13 | 4 | 17 |
| Mean Fluorescence (AU) | 749 | 554 | 744 | 601 |
| SD | 234 | 47 | 197 | 162 |
| CV | 31% | 9% | 26% | 27% |

[0348] Additionally, the retest of the top 75 clones indicated that several were now superior to the benchmark clones.

### Example 16

### Construction of N-Terminal Extensions of XTEN-Construction and Screening of Combinatorial 12mer and 36mer Libraries

[0349] This example details a step in the optimization of the N-terminus of the XTEN protein to promote the initiation of translation to allow for expression of XTEN fusions at the N-terminus of proteins without the presence of a helper domain. With preferences for the first two codons established (see Example supra), the N-terminus was examined in a broader context by combining the 12 selected 12mer sequences (see Example supra) at the very N-terminus followed by 125 previously constructed 36mer segments (see example supra) in a combinatorial manner. This created novel 48mers at the N-terminus of the XTEN protein and enabled the assessment of the impact of longer-range interactions at the N-terminus on expression of the longer sequences (FIG. 29) Similar to the dimerization procedures used to assemble 36mers (see Example infra), the plasmids containing the 125 selected 36mer segments were digested with restriction enzymes BbsI/NcoI and the appropriate fragment was gel-purified. The plasmid from clone AC94 (CBD-XTEN_AM875-GFP) was also digested with BsaI/NcoI and the appropriate fragments were gel-purified. These fragments were ligated together and transformed into E. coli BL21Gold(DE3) competent cells to obtain colonies of the library LCW0579, which also served as the vector for further cloning 12 selected 12mers at the very N-terminus. The plasmids of LCW0579 were digested with NdeI/EcoRI/BsaI and the appropriate fragments were gel-purified. 12 pairs of oligonucleotides encoding 12 selected 12mer sequences were designed, annealed and ligated with the NdeI/EcoRI/BsaI digested LCW0579 vector, and transformed into E. coli BL21Gold(DE3) competent cells to obtain colonies of the library LCW0580. With a theoretical diversity of 1500 unique clones, a total of 1512 individual colonies from the created library were picked and grown overnight to saturation in 500 μl of super broth media in a 96 deep well plate. This provided sufficient coverage to understand relative library performance and sequence preferences. The saturated overnight cultures were used to inoculate new 500 μl cultures in auto-induction media that were grown overnight at 26° C. These expression cultures were then assayed using a fluorescence plate reader (excitation 395 nm, emission 510 nm) to determine the amount of GFP reporter present. The top 90 clones were sequenced and retested for GFP reporter expression. 83 clones yielded usable sequencing data and were used for subsequent analysis. The sequencing data was used to determine the lead 12mer that was present in each clone and the impact of each 12mer on expression was assessed. Clones LCW546_{—}06 and LCW546_{—}09 stood out as being the superior N-terminus (see Table 18).

TABLE 18
Relative Performance of Clones Starting with LCW546_06 and LCW459_09

| | LCW546_06 | All Others | LCW546_09 | All Others |
|---|---|---|---|---|
| N | 11 | 72 | 9 | 74 |
| Mean | 1100 | 752 | 988 | 775 |
| Fluorescence (AU) | | | | |
| SD | 275 | 154 | 179 | 202 |
| CV | 25% | 20% | 18% | 26% |

[0350] The sequencing and retest also revealed several instances of independent replicates of the same sequence in the data producing similar results, thus increasing confidence in the assay. Additionally, 10 clones with 6 unique sequences were superior to the benchmark clone. They are presented in Table 19. It was noted that these were the only occurrences of these sequences and in no case did one of these sequences occur and fail to beat the bench-mark clone. These six sequences were advanced for further optimization.

TABLE 19
Combinatorial 12mer and 36mer Clones Superior to Benchmark Clone

| | | SEQ | | |
|---|---|---|---|---|
| | | ID | | |
| Clone Name | First 60 codons | NO: | 12mer Name | 36mer Name |
| LCW580_51 | ATGGCTAGTCCTGCTGGCTCTCCAACCTCCACTGA | 656 | LCW546_06 | LCW0404_040 |
| | GGAAGGTGCATCCCCGGGCACCAGCTCTACCGGTT | | | |
| | CTCCAGGTAGCTCTACCCCGTCTGGTGCTACCGGC | | | |
| | TCTCCAGGTAGCTCTACCCCGTCTGGTGCTACTGG | | | |
| | CTCTCCAGGTACTTCTACTGAACCGTCTGAAGGCA | | | |
| | GCGCA | | | |
| LCW580_81 | ATGGCTAGTCCTGCTGGCTCTCCAACCTCCACTGA | 657 | LCW546_06 | LCW0404_040 |
| | GGAAGGTGCATCCCCGGGCACCAGCTCTACCGGTT | | | |
| | CTCCAGGTAGCTCTACCCCGTCTGGTGCTACCGGC | | | |
| | TCTCCAGGTAGCTCTACCCCGTCTGGTGCTACTGG | | | |
| | CTCTCCAGGTACTTCTACTGAACCGTCTGAAGGCA | | | |
| | GCGCA | | | |
| LCW580_38 | ATGGCTAGTCCTGCTGGCTCTCCAACCTCCACTGA | 658 | LCW546_06 | LCW0402_041 |
| | GGAAGGTACTTCTACCGAACCGTCCGAGGGTAGCG | | | |
| | CACCAGGTAGCCCAGCAGGTTCTCCTACCTCCACC | | | |
| | GAGGAAGGTACTTCTACCGAACCGTCCGAGGGTA | | | |
| | GCGCACCAGGTACTTCTACTGAACCGTCTGAAGGC | | | |
| | AGCGCA | | | |
| LCW580_63 | ATGGCTAGTCCTGCTGGCTCTCCGACCTCTACTGA | 659 | LCW546_09 | LCW0402_020 |
| | GGAAGGTACTTCTACTGAACCGTCTGAAGGCAGCG | | | |
| | CACCAGGTAGCGAACCGGCTACTTCCGGTTCTGAA | | | |
| | ACCCCAGGTAGCCCAGCAGGTTCTCCAACTTCTAC | | | |
| | TGAAGAAGGTACTTCTACTGAACCGTCTGAAGGCA | | | |
| | GCGCA | | | |
| LCW580_06 | ATGGCTAGTCCTGCTGGCTCTCCAACCTCCACTGA | 660 | LCW546_06 | LCW0404_031 |
| | GGAAGGTACCCCGGGTAGCGGTACTGCTTCTTCCT | | | |
| | CTCCAGGTAGCTCTACCCCTTCTGGTGCAACCGGC | | | |
| | TCTCCAGGTGCTTCTCCGGGCACCAGCTCTACCGG | | | |
| | TTCTCCAGGTACTTCTACTGAACCGTCTGAAGGCA | | | |
| | GCGCA | | | |
| LCW580_35 | ATGGCTAGTCCTGCTGGCTCTCCGACCTCTACTGA | 661 | LCW546_09 | LCW0402_020 |
| | GGAAGGTACTTCTACTGAACCGTCTGAAGGCAGCG | | | |
| | CACCAGGTAGCGAACCGGCTACTTCCGGTTCTGAA | | | |
| | ACCCCAGGTAGCCCAGCAGGTTCTCCAACTTCTAC | | | |
| | TGAAGAAGGTACTTCTACTGAACCGTCTGAAGGCA | | | |
| | GCGCA | | | |
| LCW580_67 | ATGGCTAGTCCTGCTGGCTCTCCGACCTCTACTGA | 662 | LCW546_09 | LCW0403_064 |
| | GGAAGGTACCTCCCCTAGCGGCGAATCTTCTACTG | | | |
| | CTCCAGGTACCTCTCCTAGCGGCGAATCTTCTACC | | | |
| | GCTCCAGGTACCTCCCCTAGCGGTGAATCTTCTAC | | | |
| | CGCACCAGGTACTTCTACTGAACCGTCTGAAGGCA | | | |
| | GCGCA | | | |
| LCW580_13 | ATGGCTAGTCCTGCTGGCTCTCCGACCTCTACTGA | 663 | LCW546_09 | LCW0403_060 |
| | GGAAGGTACCTCTACTCCGGAAAGCGGTTCCGCAT | | | |
| | CTCCAGGTTCTACCAGCGAATCCCCGTCTGGCACC | | | |
| | GCACCAGGTTCTACTAGCTCTACTGCTGAATCTCC | | | |
| | GGGCCCAGGTACTTCTACTGAACCGTCTGAAGGCA | | | |
| | GCGCA | | | |
| LCW580_88 | ATGGCTAGTCCTGCTGGCTCTCCGACCTCTACTGA | 664 | LCW546_09 | LCW0403_064 |
| | GGAAGGTACCTCCCCTAGCGGCGAATCTTCTACTG | | | |
| | CTCCAGGTACCTCTCCTAGCGGCGAATCTTCTACC | | | |
| | GCTCCAGGTACCTCCCCTAGCGGTGAATCTTCTAC | | | |
| | CGCACCAGGTACTTCTACTGAACCGTCTGAAGGCA | | | |
| | GCGCA | | | |
| LCW580_11 | ATGGCTAGTCCTGCTGGCTCTCCGACCTCTACTGA | 665 | LCW546_09 | LCW0403_060 |
| | GGAAGGTACCTCTACTCCGGAAAGCGGTTCCGCAT | | | |
| | CTCCAGGTTCTACCAGCGAATCCCCGTCTGGCACC | | | |
| | GCACCAGGTTCTACTAGCTCTACTGCTGAATCTCC | | | |
| | GGGCCCAGGTACTTCTACTGAACCGTCTGAAGGCA | | | |
| | GCGCA | | | |

### Example 17

### Construction of N-Terminal Extensions of XTEN-Construction and Screening of Combinatorial 12mer and 36mer Libraries for XTEN-AM875 and XTEN-AE864

[0351] This example details a step in the optimization of the N-terminus of the XTEN protein to promote the initiation of translation to allow for expression of XTEN fusions at the N-terminus of proteins without the presence of a helper domain. With preferences for the first four codons (see Examples supra, and for the best pairing of N-terminal 12mers and 36mers (see Example supra) established, a combinatorial approach was undertaken to examine the union of these preferences. This created novel 48mers at the N-terminus of the XTEN protein and enabled the testing of the confluence of previous conclusions. Additionally, the ability of these leader sequences to be a universal solution for all XTEN proteins was assessed by placing the new 48mers in front of both XTEN-AE864 and XTEN-AM875. Instead of using all 125 clones of 36mer segment, the plasmids from 6 selected clones of 36mer segment with best GFP expression in the combinatorial library were digested with NdeI/EcoRI/BsaI and the appropriate fragments were gel-purified. The plasmids from clones AC94 (CBD-XTEN_AM875-GFP) and AC104 (CBD-XTEN_AE864-GFP) were digested with digested with NdeI/EcoRI/BsaI and the appropriate fragments were gel-purified. These fragments were ligated together and transformed into E. coli BL21Gold(DE3) competent cells to obtain colonies of the libraries LCW0585 (—XTEN_AM875-GFP) and LCW0586 (—XTEN_AE864-GFP), which could also serve as the vectors for further cloning 8 selected 12mers at the very N-terminus. The plasmids of LCW0585 and LCW0586 were digested with NdeI/EcoRI/BsaI and the appropriate fragments were gel-purified. 8 pairs of oligonucleotides encoding 8 selected 12mer sequences with best GFP expression in the previous (Generation 2) screening were designed, annealed and ligated with the NdeI/EcoRI/BsaI digested LCW0585 and LCW0586 vectors, and transformed into E. coli BL21Gold(DE3) competent cells to obtain colonies of the final libraries LCW0587 (XTEN_AM923-GFP) and LCW0588 (XTEN_AE912-GFP). With a theoretical diversity of 48 unique clones, a total of 252 individual colonies from the created libraries were picked and grown overnight to saturation in 500 μl of super broth media in a 96 deep well plate. This provided sufficient coverage to understand relative library performance and sequence preferences. The saturated overnight cultures were used to inoculate new 500 μl cultures in auto-induction media in which were grown overnight at 26° C. These expression cultures were then assayed using a fluorescence plate reader (excitation 395 nm, emission 510 nm) to determine the amount of GFP reporter present. The top 36 clones were sequenced and retested for GFP reporter expression. 36 clones yielded usable sequencing data and these 36 were used for the subsequent analysis. The sequencing data determined the 12mer, the third codon, the fourth codon and the 36mer present in the clone and revealed that many of the clones were independent replicates of the same sequence. Additionally, the retest results for these clones are close in value, indicating the screening process was robust. Preferences for certain combinations at the N-terminus were seen and were consistently yielding higher fluorescence values approximately 50% greater than the benchmark controls (see Tables 20 and 21). These date support the conclusion that the inclusion of the sequences encoding the optimized N-terminal XTEN into the fusion protein genes conferred a marked enhancement on the expression of the fusion proteins.

TABLE 20
Preferred N-terminal Combinations for XTEN-AM875

| Clone Name | Number of Replicates | 12 mer | 36 mer | Mean | SD | CV |
|---|---|---|---|---|---|---|
| CBD-AM875 | NA | NA | NA | 1715 | 418 | 16% |
| LCW587_08 | 7 | LCW546_06_3=GAA | LCW404_40 | 2333 | 572 | 18% |
| LCW587_17 | 5 | LCW546_09_3=GAA | LCW403_64 | 2172 | 293 | 10% |

TABLE 21
Preferred N-terminal Combinations for XTEN-AE864

| | Num- | | | | | |
|---|---|---|---|---|---|---|
| | ber of | | | | | |
| | Repli- | | | | | |
| Clone Name | cates | 12 mer | 36 mer | Mean | SD | CV |
| AC82 | NA | NA | NA | 1979 | 679 | 24% |
| LCW588_14 | 8 | LCW546_06_opt3 | LCW404_31 | 2801 | 240 | 6% |
| LCW588_27 | 2 | LCW546_06_opt34 | LCW404_40 | 2839 | 556 | 15% |

[0352] Notably, the preferred combination of the N-terminal for the XTEN-AM875 and the preferred combination for the XTEN-AE864 are not the same, indicating more complex interactions further than 150 bases from the initiation site influence expression levels. The sequences for the preferred nucleotide sequences are listed in Table 22 and the preferred clones were analyzed by SDS-PAGE to independently confirm expression (see FIG. 30). The complete sequences of XTEN_AM923 and XTEN_AE912 were selected for further analysis.

TABLE 22
Preferred DNA Nucleotide Sequences for first 48 Amino
Acid Residues of N-terminal XTEN-AM875 and XTEN-AE864

| | | | SEQ |
|---|---|---|---|
| | XTEN | | ID |
| Clone Name | Modified | DNA Nucleotide Sequence | NO: |
| LCW587_08 | AM875 | ATGGCTGAACCTGCTGGCTCTCCAACCTCCACTGAGGAAGGTGCATC | 666 |
| | | CCCGGGCACCAGCTCTACCGGTTCTCCAGGTAGCTCTACCCCGTCTG | |
| | | GTGCTACCGGCTCTCCAGGTAGCTCTACCCCGTCTGGTGCTACTGGC | |
| | | TCTCCAGGTACTTCTACTGAACCGTCTGAAGGCAGCGCA | |
| LCW587_17 | AM875 | ATGGCTGAACCTGCTGGCTCTCCGACCTCTACTGAGGAAGGTACCTC | 667 |
| | | CCCTAGCGGCGAATCTTCTACTGCTCCAGGTACCTCTCCTAGCGGCG | |
| | | AATCTTCTACCGCTCCAGGTACCTCCCCTAGCGGTGAATCTTCTACC | |
| | | GCACCAGGTACTTCTACTGAACCGTCTGAAGGCAGCGCA | |
| LCW588_14 | AE864 | ATGGCTGAACCTGCTGGCTCTCCAACCTCCACTGAGGAAGGTACCCC | 668 |
| | | GGGTAGCGGTACTGCTTCTTCCTCTCCAGGTAGCTCTACCCCTTCTGG | |
| | | TGCAACCGGCTCTCCAGGTGCTTCTCCGGGCACCAGCTCTACCGGTT | |
| | | CTCCAGGTAGCCCGGCTGGCTCTCCTACCTCTACTGAG | |
| LCW588_27 | AE864 | ATGGCTGAAACTGCTGGCTCTCCAACCTCCACTGAGGAAGGTGCATC | 669 |
| | | CCCGGGCACCAGCTCTACCGGTTCTCCAGGTAGCTCTACCCCGTCTG | |
| | | GTGCTACCGGCTCTCCAGGTAGCTCTACCCCGTCTGGTGCTACTGGC | |
| | | TCTCCAGGTAGCCCGGCTGGCTCTCCTACCTCTACTGAG | |

### Example 18

### Methods of Producing and Evaluating BFXTEN

[0353] A general schema for producing and evaluating BFXTEN compositions is presented in FIG. 6, and forms the basis for the general description of this Example. Using the disclosed methods and those known to one of ordinary skill in the art, together with guidance provided in the illustrative examples, a skilled artesian can create and evaluate BFXTEN fusion proteins comprising, XTENs, BP and variants of BP known in the art. The Example is, therefore, to be construed as merely illustrative, and not limitative of the methods in any way whatsoever; numerous variations will be apparent to the ordinarily skilled artisan.

[0354] The general schema for producing polynucleotides encoding XTEN is presented in FIGS. 4 and 5. FIG. 5 is a schematic flowchart of representative steps in the assembly of a XTEN polynucleotide construct in one of the embodiments of the invention. Individual oligonucleotides 501 are annealed into sequence motifs 502 such as a 12 amino acid motif (“12-mer”), which is subsequently ligated with an oligo containing BbsI, and KpnI restriction sites 503. The motif libraries can be limited to the specific sequence families; e.g., the AD, AE, AF, AG, AM, AQ, BC or BD sequences of Table 1. Additional sequence motifs from a library are annealed to the 12-mer to create a “building block” length; e.g., a segment that encodes 36 amino acids. The gene encoding the XTEN sequence is assembled by ligation and multimerization of the “building blocks” until the desired length of the XTEN gene 504 is achieved. For example, multimerization can be performed by ligation, overlap extension, PCR assembly or similar cloning techniques known in the art. The XTEN gene is then cloned into a stuffer vector. In one example, the vector can encode a Flag sequence 506 followed by a stuffer sequence that is flanked by BsaI, BbsI, and KpnI sites 507 and a BP gene 508, resulting in the gene encoding BFXTEN 500.

[0355] DNA sequences encoding a candidate BP are conveniently obtained by standard procedures known in the art from a cDNA library prepared from an appropriate cellular source, from a genomic library, or may be created synthetically (e.g., automated nucleic acid synthesis) using DNA sequences obtained from publicly available databases, patents, or literature references. A gene or polynucleotide encoding each of the BP portions of the protein is then be cloned into a construct, such as those described herein, which can be a plasmid or other vector under control of appropriate transcription and translation sequences for high level protein expression in a biological system. A second gene or polynucleotide coding for each XTEN is genetically fused to the nucleotides encoding the N- and/or C-terminus of the BP gene, depending on the desired N- to C-terminus configuration desired, by cloning it into the construct adjacent and in frame with the gene coding for the BP through a ligation or multimerization step. In this manner, a chimeric DNA molecule coding for (or complementary to) a BFXTEN fusion protein is generated within the construct. The construct is designed in different configurations to encode the various permutations of the fusion partners as described herein. For example, the gene can be created to encode the fusion protein in the order (N- to C-terminus): BP-XTEN; XTEN-BP; BP-XTEN-BP; XTEN-BP-XTEN (FIG. 1); as well a configuration of formula I-VI. Optionally, this chimeric DNA molecule may be transferred or cloned into another construct that is a more appropriate expression vector. At this point, a host cell capable of expressing the chimeric DNA molecule is transformed with the chimeric DNA molecule. The vectors containing the DNA segments of interest are transferred into an appropriate host cell by well-known methods, depending on the type of cellular host, as described supra.

[0356] Host cells containing the polynucleotides of interest are cultured in conventional nutrient media modified as appropriate for activating promoters, selecting transformants or amplifying genes. The culture conditions, such as temperature, pH and the like, are those previously used with the host cell selected for expression, and will be apparent to the ordinarily skilled artisan. Cells are typically harvested by centrifugation, disrupted by physical or chemical means, and the resulting crude extract retained for further purification. For compositions secreted by the host cells, supernatant from centrifugation is separated and retained for further purification.

[0357] Gene expression may be measured in a sample directly, for example, by conventional Southern blotting, Northern blotting to quantitate the transcription of mRNA [Thomas, Proc. Natl. Acad. Sci. USA, 77:5201-5205 (1980)], dot blotting (DNA analysis), or in situ hybridization, using an appropriately labeled probe, based on the sequences provided herein. Gene expression, alternatively, may be measured by immunological of fluorescent methods, such as immunohistochemical staining of cells or tissue sections and assay of cell culture or body fluids or the detection of selectable markers, to quantitate directly the expression of gene product. Antibodies useful for immunohistochemical staining and/or assay of sample fluids may be either monoclonal or polyclonal, and may be prepared in any mammal. Conveniently, the antibodies may be prepared against a native sequence BP polypeptide or against a synthetic peptide based on the DNA sequences provided herein or against exogenous sequence fused to BP and encoding a specific antibody epitope. Examples of selectable markers are well known to one of skill in the art and include reporters such as enhanced green fluorescent protein (EGFP), beta-galactosidase (β-gal) or chloramphenicol acetyltransferase (CAT).

[0358] BFXTEN polypeptide product may be purified via methods known in the art. Procedures such as gel filtration, affinity purification, salt fractionation, ion exchange chromatography, size exclusion chromatography, hydroxyapatite adsorption chromatography, hydrophobic interaction chromatography and gel electrophoresis may be used. Some expressed BFXTEN may require refolding during isolation and purification. Methods of purification are described in Robert K. Scopes, Protein Purification: Principles and Practice, Charles R. Castor, ed., Springer-Verlag 1994, and Sambrook, et al., supra. Multi-step purification separations are also described in Baron, et al., Crit. Rev. Biotechnol. 10:179-90 (1990) and Below, et al., J. Chromatogr. A. 679:67-83 (1994).

[0359] As illustrated in FIG. 6, the isolated BFXTEN fusion proteins are characterized for their chemical and biological activity properties. Isolated BFXTEN may be characterized, e.g., for sequence, purity, apparent molecular weight, solubility and stability using standard methods known in the art. BFXTEN meeting expected standards can then be evaluated for biological activity, which can be measured using in vitro or in vivo assays, such as the assays of Table 32. For example, one or more assays known in the art for evaluating BP is performed and used as the endpoint for which therapeutic activity is measured. One such assay is receptor binding, to verify that the configuration of the BFXTEN permits binding to the target receptor, relative to BP not linked to XTEN. To evaluate the receptor binding activity of the fusion proteins an ELISA based receptor binding assay is used. The wells of an assay plate are coated with 50 ng per well of the target receptor fused to Fc domain of human IgG. Subsequently the wells are blocked with 3% BSA to prevent nonspecific interactions with the solid phase. After thoroughly washing the wells, a dilution series of different configurations of BFXTEN fusion proteins are applied to the wells. The binding reaction is allowed to proceed for 2 hr at room temperature. Unbound fusion protein or free BP is removed by repeated washing. The bound fusion proteins (or BP positive control) are detected with a biotinylated anti-BP antibody and a horseradish peroxidase-conjugated streptavidin. The reaction is developed with TMB substrate for 20 minutes at room temperature. Color development is stopped with the addition of 0.2 N sulfuric acid. The absorbance of each well at 450 nm and 570 nm is recorded on a SpectrMax 384Plus spectrophotometer. The corrected absorbance signal (Abs_{corr}=Abs₄₅₀ₙₘ−Abs₅₇₀ₙₘ) is plotted as a function of reactant concentration to produce a binding isotherm. To estimate the binding affinity of each fusion protein for the receptor, the binding data are fit to a sigmoidal dose-response curve. From the fit of the data an EC50 (the concentration of BP or fusion protein at which the signal is half maximal) for each construct is determined. BFXTEN fusion proteins with the desired degree of binding affinity are considered candidates for further evaluation. Other in vitro or ex vivo assays, such as the assays of Table 32, are performed, depending on the biological activity to be confirmed.

[0360] In addition, BFXTEN fusion proteins (either singly in the case of BMXTEN or in combination in the case of BCXTEN), are administered to one or more animal species to determine standard pharmacokinetic parameters, using methods described in Example 24. BFXTEN with enhanced pharmacokinetics compared to BP not bound to XTEN are considered candidates for further evaluation.

[0361] By the iterative process of producing, expressing, and recovering BFXTEN constructs of the invention, followed by their characterization using methods disclosed herein or others known in the art, BFXTEN compositions comprising any BP and any XTEN as contemplated by the invention are produced and evaluated by one of ordinary skill in the art to confirm the expected properties such as enhanced solubility, enhanced stability, retention of biological activity, improved pharmacokinetics and reduced immunogenicity, leading to an overall enhanced therapeutic activity compared to the corresponding unfused BP. For those fusion proteins not possessing the desired properties, a different sequence or configuration, or a different combination of BPs is constructed, expressed, isolated and evaluated by these methods in order to obtain a BFXTEN composition with the desired properties.

### Example 19

### Analytical Size Exclusion Chromatography of XTEN Fusion Proteins with Diverse Payloads

[0362] Size exclusion chromatography analyses were performed on fusion proteins containing various therapeutic proteins and unstructured recombinant proteins of increasing length. An exemplary assay used a TSKGel-G4000 SWXL (7.8 mm×30 cm) column in which 40 μg of purified glucagon fusion protein at a concentration of 1 mg/ml was separated at a flow rate of 0.6 ml/min in 20 mM phosphate pH 6.8, 114 mM NaCl. Chromatogram profiles were monitored using OD214 nm and OD280 nm. Column calibration for all assays were performed using a size exclusion calibration standard from BioRad; the markers include thyroglobulin (670 kDa), bovine gamma-globulin (158 kDa), chicken ovalbumin (44 kDa), equine myoglobuin (17 kDa) and vitamin B12 (1.35 kDa). Representative chromatographic profiles of Glucagon-Y288, Glucagon-Y144, Glucagon-Y72, Glucagon-Y36 are shown as an overlay in FIG. 25. The data show that the apparent molecular weight of each compound is proportional to the length of the attached unstructured sequence. However, the data also show that the apparent molecular weight of each construct is significantly larger than that expected for a globular protein (as shown by comparison to the standard proteins run in the same assay). Based on the SEC analyses for all constructs evaluated, the apparent molecular weights, the apparent molecular weight factor (expressed as the ratio of apparent molecular weight to the calculated molecular weight) and the hydrodynamic radius (R_{H} in nM) are shown in Table 23. The results indicate that incorporation of different XTENs of 576 amino acids or greater confers an apparent molecular weight for the fusion protein of approximately 339 kDa to 760, and that XTEN of 864 amino acids or greater confers an apparent molecular weight greater than approximately 800 kDA. The results of proportional increases in apparent molecular weight to actual molecular weight were consistent for fusion proteins created with XTEN from several different motif families; i.e., AD, AE, AF, AG, and AM, with increases of at least four-fold and ratios as high as about 17-fold. Additionally, the incorporation of XTEN fusion partners with 576 amino acids or more into fusion proteins with biologically active proteins resulted with a hydrodynamic radius of 7 nm or greater; well beyond the glomerular pore size of approximately 3-5 nm. Accordingly, it is concluded that fusion proteins comprising biologically active proteins and XTEN would have reduced renal clearance, contributing to increased terminal half-life and improving the therapeutic or biologic effect relative to a corresponding un-fused biologically active protein.

TABLE 23
SEC analysis of various polypeptides

| | XTEN | | | Appar- | Apparent | |
|---|---|---|---|---|---|---|
| Con- | or | Thera- | Actual | ent | Molecular | |
| struct | fusion | peutic | MW | MW | Weight | R_{H} |
| Name | partner | Protein | (kDa) | (kDa) | Factor | (nm) |
| AC14 | Y288 | Glucagon | 28.7 | 370 | 12.9 | 7.0 |
| AC28 | Y144 | Glucagon | 16.1 | 117 | 7.3 | 5.0 |
| AC34 | Y72 | Glucagon | 9.9 | 58.6 | 5.9 | 3.8 |
| AC33 | Y36 | Glucagon | 6.8 | 29.4 | 4.3 | 2.6 |
| AC89 | AF120 | Glucagon | 14.1 | 76.4 | 5.4 | 4.3 |
| AC88 | AF108 | Glucagon | 13.1 | 61.2 | 4.7 | 3.9 |
| AC73 | AF144 | Glucagon | 16.3 | 95.2 | 5.8 | 4.7 |
| AC53 | AG576 | GFP | 74.9 | 339 | 4.5 | 7.0 |
| AC39 | AD576 | GFP | 76.4 | 546 | 7.1 | 7.7 |
| AC41 | AE576 | GFP | 80.4 | 760 | 9.5 | 8.3 |
| AC52 | AF576 | GFP | 78.3 | 526 | 6.7 | 7.6 |
| AC85 | AE864 | Exendin-4 | 83.6 | 938 | 11.2 | 8.9 |
| AC114 | AM875 | Exendin-4 | 82.4 | 1344 | 16.3 | 9.4 |
| AC143 | AM875 | hGH | 100.6 | 846 | 8.4 | 8.7 |
| AC227 | AM875 | IL-1ra | 95.4 | 1103 | 11.6 | 9.2 |
| AC228 | AM1296 | IL-1ra | 134.8 | 2286 | 17.0 | 10.5 |

### Example 20

### Pharmacokinetics of Extended Polypeptides Fused to GFP in Cynomolgus Monkeys

[0363] The pharmacokinetics of GFP-L288, GFP-L576, GPF-XTEN_AF576, GFP-XTEN_Y576 and XTEN_AD836-GFP were tested in cynomolgus monkeys to determine the effect of composition and length of the unstructured polypeptides on PK parameters. Blood samples were analyzed at various times after injection and the concentration of GFP in plasma was measured by ELISA using a polyclonal antibody against GFP for capture and a biotinylated preparation of the same polyclonal antibody for detection. Results are summarized in FIG. 24. They show a surprising increase of half-life with increasing length of the XTEN sequence. For example, a half-life of 10 h was determined for GFP-XTEN_L288 (with 288 amino acid residues in the XTEN). Doubling the length of the unstructured polypeptide fusion partner to 576 amino acids increased the half-life to 20-22 h for multiple fusion protein constructs; i.e., GFP-XTEN_L576, GPF-XTEN_AF576, GFP-XTEN_Y576. A further increase of the unstructured polypeptide fusion partner length to 836 residues resulted in a half-life of 72-75 h for XTEN_AD836-GFP. Thus, increasing the polymer length by 288 residues from 288 to 576 residues increased in vivo half-life by about 10 h. However, increasing the polypeptide length by 260 residues from 576 residues to 836 residues increased half-life by more than 50 h. These results show that there is a surprising threshold of unstructured polypeptide length that results in a greater than proportional gain in in vivo half-life. Thus, fusion proteins comprising extended, unstructured polypeptides are expected to have the property of enhanced pharmacokinetics compared to polypeptides of shorter lengths.

### Example 21

### Serum Stability of XTEN

[0364] A fusion protein containing XTEN_AE864 fused to the N-terminus of GFP was incubated in monkey plasma and rat kidney lysate for up to 7 days at 37° C. Samples were withdrawn at time 0, Day 1 and Day 7 and analyzed by SDS PAGE followed by detection using Western analysis and detection with antibodies against GFP as shown in FIG. 13. The sequence of XTEN_AE864 showed negligible signs of degradation over 7 days in plasma. However, XTEN_AE864 was rapidly degraded in rat kidney lysate over 3 days. The in vivo stability of the fusion protein was tested in plasma samples wherein the GFP_AE864 was immunoprecipitated and analyzed by SDS PAGE as described above. Samples that were withdrawn up to 7 days after injection showed very few signs of degradation. The results demonstrate the resistance of BPXTEN to degradation due to serum proteases; a factor in the enhancement of pharmacokinetic properties of the BPXTEN fusion proteins.

### Example 22

### Construction of BFXTEN Component XTEN_IL-1ra Genes and Vectors

[0365] The gene encoding human IL-1ra of 153aa was amplified by polymerase chain reaction (PCR) with primers 5′-ATAAAGGGTCTCCAGGTCGTCCGTCCGGTCGTAAATC (SEQ ID NO: 670) and 5′-AACTCGaagcttTTATTCGTCCTCCTGGAAGTAAAA (SEQ ID NO: 671), which introduced flanking BsaI and HindIII (underlined) restriction sites that are compatible with the BbsI and HindIII sites that flank the stuffer in the XTEN destination vector (FIG. 7C). The XTEN destination vectors contain the kanamycin-resistance gene and are pET30 derivatives from Novagen in the format of Cellulose Binding Domain (CBD)-XTEN-Green Fluorescent Protein (GFP), where GFP is the stuffer for cloning payloads at C-terminus. Constructs were generated by replacing GFP in the XTEN destination vectors with the IL-1ra encoding fragment (FIG. 7). The XTEN destination vector features a T7 promoter upstream of CBD followed by an XTEN sequence fused in-frame upstream of the stuffer GFP sequence. The XTEN sequences employed are XTEN_AM875, XTEN_AM1318, AF875 and AE864 which have lengths of 875, 1318, 875 and 864 amino acids, respectively. The stuffer GFP fragment was removed by restriction digestion using BbsI and HindIII endonucleases. BsaI and HindIII restriction digested IL-1ra DNA fragment was ligated into the BbsI and HindIII digested XTEN destination vector using T4 DNA ligase and the ligation mixture was transformed into E. coli strain BL21 (DE3) Gold (Stratagene) by electroporation. Transformants were identified by the ability to grow on LB plates containing the antibiotic kanamycin. Plasmid DNAs were isolated from selected clones and confirmed by restriction analysis and DNA sequencing. The final vector yields the CBD_XTEN_IL-1ra gene under the control of a T7 promoter and CBD is cleaved by engineered TEV cleavage site at the end to generate XTEN_IL1-ra. Various constructs with IL-1ra fused at C-terminus to different XTENs include AC1723 (CBD-XTEN_AM875-IL-1ra), AC175 (CBD-XTEN_AM1318-IL-1ra), AC180 (CBD-XTEN_AF875-IL-1ra), and AC182 (CBD-XTEN_AE864-IL-1ra).

### Example 23

### Expression, Purification, and Characterization of Human Interleukin-1 Receptor Agonist (IL-1ra) Fused to XTEN_AM875 and XTEN_AE864

[0366] Cell Culture Production

[0367] A starter culture was prepared by inoculating glycerol stocks of E. coli carrying a plasmid encoding for IL-1ra fused to AE864, AM875, or AM1296 [SEQ ID No. 54, 56, or 60] into 100 mL 2×YT media containing 40 ug/mL kanamycin. The culture was then shaken overnight at 37° C. 100 mL of the starter culture was used to inoculate 25 liters of 2×YT containing 40 μg/mL kanamycin and shaken until the OD600 reached about 1.0 (for 5 hours) at 37° C. The temperature was then reduced to 26° C. and protein expression was induced with IPTG at 1.0 mM final concentration. The culture was then shaken overnight at 26° C. Cells were harvested by centrifugation yielding a total of 200 grams cell paste. The paste was stored frozen at −80° C. until use.

[0368] Purification of BFXTEN Comprising IL-1ra-XTEN AE864 or IL-1ra-AM875

[0369] Cell paste was suspended in 20 mM Tris pH 6.8, 50 mM NaCl at a ratio of 4 ml of buffer per gram of cell paste. The cell paste was then homogenized using a top-stirrer. Cell lysis was achieved by passing the sample once through a microfluidizer at 20000 psi. The lysate was clarified to by centrifugation at 12000 rpm in a Sorvall G3A rotor for 20 minutes.

[0370] Clarified lysate was directly applied to 800 ml of Macrocap Q anion exchange resin (GE Life Sciences) that had been equilibrated with 20 mM Tris pH 6.8, 50 mM NaCl. The column was sequentially washed with Tris pH 6.8 buffer containing 50 mM, 100 mM, and 150 mM NaCl. The product was eluted with 20 mM Tris pH 6.8, 250 mM NaCl.

[0371] A 250 mL Octyl Sepharose FF column was equilibrated with equilibration buffer (20 mM Tris pH 6.8, 1.0 M Na₂SO₄). Solid Na₂SO₄ was added to the Macrocap Q eluate pool to achieve a final concentration of 1.0 M. The resultant solution was filtered (0.22 micron) and loaded onto the HIC column. The column was then washed with equilibration buffer for 10 CV to remove unbound protein and host cell DNA. The product was then eluted with 20 mM Tris pH 6.8, 0.5 M Na₂SO₄.

[0372] The pooled HIC eluate fractions were then diluted with 20 mM Tris pH 7.5 to achieve a conductivity of less than 5.0 mOhms. The dilute product was loaded onto a 300 ml Q Sepharose FF anion exchange column that had been equilibrated with 20 mM Tris pH 7.5, 50 mM NaCl.

[0373] The buffer exchanged proteins were then concentrated by ultrafiltration/diafiltration (UF/DF), using a Pellicon XL Biomax 30000 mwco cartridge, to greater than 30 mg/ml. The concentrate was sterile filtered using a 0.22 micron syringe filter. The final solution was aliquoted and stored at −80° C., and was used for the experiments that follow, infra.

[0374] SDS-PAGE Analysis

[0375] 2 and 10 mcg of final purified protein were subjected to non-reducing SDS-PAGE using NuPAGE 4-12% Bis-Tris gel from Invitrogen according to manufacturer's specifications. The results (FIG. 14) show that the IL-1ra-XTEN_AE864 composition was recovered by the process detailed above, with an approximate MW of about 160 kDa.

[0376] Analytical Size Exclusion Chromatography

[0377] Size exclusion chromatography analysis was performed using a Phenomenex BioSEP SEC 54000 (7.8×300 mm) column. 20 μg of the purified protein at a concentration of 1 mg/ml was separated at a flow rate of 0.5 ml/min in 20 mM Tris-Cl pH 7.5, 300 mM NaCl. Chromatogram profiles were monitored by absorbance at 214 and 280 nm. Column calibration was performed using a size exclusion calibration standard from BioRad, the markers include thyroglobulin (670 kDa), bovine gamma-globulin (158 kDa), chicken ovalbumin (44 kDa), equine myoglobuin (17 kDa) and vitamin B12 (1.35 kDa). A representative chromatographic profile of IL-1ra-XTEN_AM875 is shown in FIG. 15, where the calibration standards are shown in the dashed line and IL-1ra-XTEN_AM875 is shown as the solid line. The data show that the apparent molecular weight of each construct is significantly larger than that expected for a globular protein (as shown by comparison to the standard proteins run in the same assay), and has an apparent molecular weight significantly greater than that determined by SDS-PAGE, describe above.

### Analytical RP-HPLC

[0378] Analytical RP-HPLC chromatography analysis was performed using a Vydac Protein C4 (4.6×150 mm) column. The column was equilibrated with 0.1% trifluoroacetic acid in HPLC grade water at a flow rate of 1 ml/min Ten micrograms of the purified protein at a concentration of 0.2 mg/ml was injected separately. The protein was eluted with a linear gradient from 5% to 90% acetonitrile in 0.1% TFA. Chromatogram profiles were monitored using OD214 nm and OD280 nm. A chromatogram of a representative batch of IL-1ra-XTEN_AM875 is shown in FIG. 16.

[0379] IL-1 Receptor Binding

[0380] To evaluate the activity of the IL-1ra-containing XTEN fusion proteins, an ELISA based receptor binding assay was used. Here the wells of a Costar 3690 assay plate were coated overnight with 50 ng per well of mouse IL-1 receptor fused to Fc domain of human IgG (IL-1R/Fc, R&D Systems). Subsequently the wells were blocked with 3% BSA to prevent nonspecific interactions with the solid phase. After thoroughly washing the wells, a dilution series of either IL-1ra-XTEN_AM875, XTEN_AM875-IL-1ra, or IL-1ra (anakinra) was applied to the wells. The binding reaction was allowed to proceed for 2 hr at room temperature. Unbound Il-1ra was removed by repeated washing. The bound IL-1ra ad IL-1ra-XTEn fusions were detected with a biotinylated anti-human II-1ra antibody and a horseradish peroxidase-conjugated streptavidin. The reaction was developed with TMB substrate for 20 minutes at room temperature. Color development was stopped with the addition of 0.2 N sulfuric acid. The absorbance of each well at 450 nm and 570 nm was recorded on a SpectrMax 384Plus spectrophotometer. The corrected absorbance signal (Abs_{corr}=Abs₄₅₀ₙₘ−Abs₅₇₀ₙₘ) was plotted as a function of IL-1ra-XTEN or IL-1ra concentration to produce a binding isotherm as shown in FIG. 17.

[0381] To estimate the binding affinity of each fusion protein for the IL-1 receptor, the binding data was fit to a sigmoidal dose-response curve. From the fit of the data an EC50 (the concentration of IL-1ra or IL-1ra-XTEN at which the signal is half maximal) for each construct was determined. As shown in FIG. 17, the EC50 of IL-1ra-XTEN_AM875, where the payload was attached to the N-terminus of the XTEN, was comparable to unmodified IL-1ra (anakinra EC50=0.013 nM, IL-1ra-XTEN_AM875 EC50=0.019 nM). XTEN_AM875-IL-1ra, where the payload was attached to the C-terminus of the XTEN, exhibited weaker binding with an EC50 (0.204 nM) that was approximately 15-fold higher that IL-1ra. The negative control XTEN_hGH construct showed no binding under the experimental conditions. The results indicate that the configuration of the fusion protein has an effect on binding affinity, and that, in this case, attaching the IL-1ra BP to the C-terminus of the XTEN significantly reduced the binding affinity to the receptor, compared to the alternative configuration.

[0382] Thermal Stabilization of IL-1ra by XTEN

[0383] In addition to extending the serum half-life of protein therapeutics, XTEN polypeptides have the property improving the thermal stability of a payload to which it is fused. For example, the hydrophilic nature of the XTEN polypeptide may reduce or prevent aggregation and thus favor refolding of the payload protein. This feature of XTEN may aid in the development of room temperature stable formulations for a variety of protein therapeutics.

[0384] In order to demonstrate thermal stabilization of IL-1ra conferred by XTEN conjugation, IL-1ra-XTEN and recombinant IL-1ra, 200 micromoles per liter, were incubated at 25° C. and 85° C. for 15 min, at which time any insoluble protein was rapidly removed by centrifugation. The soluble fraction was then analyzed by SDS-PAGE as shown in FIG. 18. Note that only IL-1ra-XTEN remained soluble after heating, while, in contrast, recombinant IL-1ra (without XTEN as a fusion partner) was completely precipitated after heating.

[0385] The IL-1 receptor binding activity of IL-1ra-XTEN was evaluated following the heat treatment described above. Receptor binding was performed as described above. Recombinant IL-1ra, which was fully denatured by heat treatment, retained less than 0.1% of its receptor activity following heat treatment. However, IL-1ra-XTEN retained approximately 40% of its receptor binding activity (FIG. 19). Together these data demonstrate that the XTEN polypeptide can prevent thermal-induced denaturation of its payload fusion partner and support the conclusion that XTEN have stabilizing properties.

### Example 24

### PK Analysis of Fusion Proteins Comprising IL-1ra and XTEN

[0386] The BFXTEN fusion proteins IL-1ra_AE864, IL-1ra_AM875, and IL-1ra_AM1296 were evaluated in cynomolgus monkeys in order to determine in vivo pharmacokinetic parameters of the respective fusion proteins. All compositions were provided in an aqueous buffer and were administered by subcutaneous (SC) route into separate animals using 1 mg/kg and/or 10 mg/kg single doses. Plasma samples were collected at various time points following administration and analyzed for concentrations of the test articles. Analysis was performed using a sandwich ELISA format. Rabbit polyclonal anti-XTEN antibodies were coated onto wells of an ELISA plate. The wells were blocked, washed and plasma samples were then incubated in the wells at varying dilutions to allow capture of the compound by the coated antibodies. Wells were washed extensively, and bound protein was detected using a biotinylated preparation of the polyclonal anti IL-1ra antibody and streptavidin HRP. Concentrations of test article were calculated at each time point by comparing the colorimetric response at each serum dilution to a standard curve. Pharmacokinetic parameters were calculated using the WinNonLin software package.

[0387] FIG. 20 shows the concentration profiles of the four IL-1ra-containing constructs, and calculated PK parameters are shown in Table 24. Following subcutaneous administration, the terminal half-life was calculated to be approximately 15-28 hours for the various preparations over the 336 h period. For reference, the published half-life of unmodified IL-1ra is well described in the literature as 4-6 h in adult humans.

[0388] Conclusions: The incorporation of different XTEN sequences into fusion proteins comprising IL-1ra results in significant enhancement of pharmacokinetic parameters for all three compositions, as demonstrated in the primate model, demonstrating the utility of such fusion protein compositions.

TABLE 24
PK parameters of BFXTEN compositions comprising IL-1ra and XTEN

| | IL-1ra | IL-1ra- | L-1ra- | IL-1ra- | |
|---|---|---|---|---|---|
| | XTEN_AE864 | XTEN_AM1296 | XTEN_AM875 | XTEN_AM875 | |
| Dose | 10 mg/kg | 1 mg/kg | 1 mg/kg | 10 mg/kg | Units |
| Tmax | 24 | 48 | 24 | 24 | Hr |
| Cmax | 334,571.5 | 5,493.3 | 7,894.7 | 172,220.5 | ng/ml |
| t1/2 | 28.0 | 24.2 | 15.5 | 19.3 | Hr |
| AUCall | 9,830,115.9 | 372,519.3 | 485,233.9 | 11,410,136.2 | (ng*Hr)/ml |
| Vz(observed)/F | 165.7 | 337.1 | 149.2 | 88.4 | ml |
| Cl(observed)/F | 4.1 | 9.7 | 6.7 | 3.2 | ml/hr |

### Example 25

### Use of BFXTEN in Diet-Induced Obese Mouse Model

[0389] The effects of combination therapy of biologically active proteins linked to XTEN were evaluated in a mouse model of diet-induced obesity to confirm the utility of fixed combinations of monomeric fusion proteins as a single BFXTEN composition.

[0390] Methods: The effects of combination therapy of glucagon linked to Y-288-XTEN (“Gcg-XTEN”) and exenatide linked to AE576-XTEN (“Ex4-XTEN”) or exenatide singly were tested in male C57BL/6J Diet-Induced Obese (DIO) Mice, age 10 weeks old. Mice raised on a 60% high fat diet were randomized into the treatment groups (n=10 per group) Ex4-XTEN864 (10 mg/kg IP Q2D), Ex4-XTEN864 (20 mg/kg IP Q4D), Ex4-XTEN864 (10 mg/kg IP Q2D) plus Gcg-XTEN288 (20 mg/kg IP BID), and Ex4-XTEN864 (20 mg/kg IP Q4D) plus Gcg-XTEN288 (40 mg/kg IP Q1D). A placebo group (n=10) treated with 20 mM Tris pH 7.5, 135 mM NaCl IP Q1D was tested in parallel. All groups were dosed continuously for 28 days. Body weight was monitored at regular intervals throughout the study and fasting blood glucose was measured before and after the treatment period. Groups were dosed continuously for a 28 day treatment period. Body weight was monitored continuously throughout the study and fasting blood glucose was measured before and after the treatment period, and lipid levels were determined after the treatment period.

[0391] Results: The results are shown in FIGS. 21-23. The data indicate that continuous dosing for one month yielded a significant reduction in weight gain in the animals treated with Gcg-XTEN alone and Ex4-XTEN alone, relative to placebo over the course of the study. In addition, animals dosed with Ex4-XTEN or Gcg-XTEN and Ex4-XTEN concurrently showed a statistically significantly greater weight loss compared to Glg-XTEN administered alone and compared to placebo. The toxic effects of glucagon administration are well documented. The maximum no-effect dose for glucagon in rats and beagle dogs has recently been reported as 1 mg/kg/day was regarded as a clear no-toxic-effect-level in both species (Eistrup C, Glucagon produced by recombinant DNA technology: repeated dose toxicity studies, intravenous administration to CD rats and beagle dogs for four weeks. Pharmacol Toxicol. 1993 August; 73(2):103-108).

[0392] The data also show that continuous dosing for one month yielded a significant reduction in fasting blood glucose for the animals treated with Ex4-XTEN alone relative to placebo, but not for animals treated with Gcg-XTEN alone. However, animals dosed with both Gcg-XTEN and exenatide concurrently showed a statistically significantly greater reduction in fasting blood glucose levels compared to either biologically active protein administered alone. Of note, the doses of Gcg-XTEN composition that resulted in the beneficial effects in combination with Ex4-XTEN were 20 and 40 μg/kg (complete fusion protein composition weight); at least 25-fold lower than the no-effect dose reported for glucagon alone in a rodent species.

[0393] Conclusions: The data support the conclusion that combination therapy with two fusion proteins of biologically active proteins linked to XTEN can result in a synergistic beneficial effect over that seen with a single biologically active protein such that administration of a combination composition can be tailored to reduce frequency of dosing or dosage compared to administration of a single biologic in order to reduce the threat of toxicity or unacceptable side effects.

### Example 26

### Human Clinical Trial Designs for Evaluating BFXTEN

[0394] Clinical trials are designed such that the efficacy and advantages of the BFXTEN compositions, relative to single biologics, can be verified in humans. For example, the BFXTEN fusion constructs comprising both glucagon and exenatide, as described in Example 25 above, would be used in clinical trials for characterizing the efficacy of the compositions. The trials would be conducted in one or more metabolic and/or cardiovascular diseases, disorders, or conditions that is improved, ameliorated, or inhibited by the administration of glucagon and exenatide. Such studies in adult patients would comprise three phases. First, a Phase I safety and pharmacokinetics study in adult patients would be conducted to determine the maximum tolerated dose and pharmacokinetics and pharmacodynamics in humans (either normal subjects or patients with a metabolic and/or cardiovascular disease or condition), as well as to define potential toxicities and adverse events to be tracked in future studies. The study is conducted in which single rising doses of compositions of fusion proteins of XTEN linked to glucagon and exenatide are administered and biochemical, PK, and clinical parameters are measured. This permits the determination of the maximum tolerated dose and establish the threshold and maximum concentrations in dosage and circulating drug that constitute the therapeutic window for the respective components. Thereafter, clinical trials of the BFXTEN compositions would be conducted in patients with the disease, disorder or condition.

[0395] Clinical Trial in Diabetes

[0396] A phase II dosing study would be conducted in diabetic patients where serum glucose pharmacodynamics and other physiologic, PK, safety and clinical parameters (such as listed below) appropriate for diabetes, insulin resistance and obesity conditions are measured as a function of the dosing of the fusion proteins comprising XTEN linked to glucagon and exenatide, yielding dose-ranging information on doses appropriate for a Phase III trial, in addition to collecting safety data related to adverse events. The PK parameters are correlated to the physiologic, clinical and safety parameter data to establish the therapeutic window for each component of the BFXTEN composition, permitting the clinician to establish either the appropriate ratio of the two component fusion proteins each comprising one biologically active protein, or to determine the single dose for a monomeric BFXTEN comprising two biologically active proteins. Finally, a phase III efficacy study would be conducted wherein diabetic patients are administered either the BFXTEN composition, a positive control, or a placebo daily, bi-weekly, or weekly (or other dosing schedule deemed appropriate given the pharmacokinetic and pharmacodynamic properties of the BFXTEN composition) for an extended period of time. Primary outcome measures of efficacy could include HbA1c concentrations, while secondary outcome measures include insulin requirements during the study, stimulated C peptide and insulin concentrations, fasting plasma glucose (FPG), serum cytokine levels, CRP levels, and insulin secretion and Insulin-sensitivity index derived from an OGTT with insulin and glucose measurements, as well as body weight, food consumption, and other accepted diabetic markers that are tracked relative to the placebo or positive control group. Efficacy outcomes are determined using standard statistical methods. Toxicity and adverse event markers would also be followed in this study to verify that the compound is safe when used in the manner described.

[0397] Clinical Trial in Arthritis

[0398] A phase II clinical study of human patients would be conducted in arthritis patients administered BFXTEN comprising XTEN linked to IL-1ra and/or anti-IL-2, anti-CD3 or a suitable anti-inflammatory protein to determine an appropriate dose to relieve at least one symptom associated with rheumatoid arthritis, including reducing joint swelling, joint tenderness, inflammation, morning stiffness, and pain, or at least one biological surrogate marker associated with rheumatoid arthritis, including reducing erythrocyte sedimentation rates, and serum levels of C-reactive protein and/or IL2 receptor. In addition, safety data related to adverse events would be collected. A phase III efficacy study would be conducted wherein arthritis patients are administered either the BFXTEN, a positive control, or a placebo daily, bi-weekly, or weekly (or other dosing schedule deemed appropriate given the pharmacokinetic and pharmacodynamic properties of the compound) for an extended period of time. Patients are evaluated for baseline symptoms of disease activity prior to receiving any treatments, including joint swelling, joint tenderness, inflammation, morning stiffness, disease activity evaluated by patient and physician as well as disability evaluated by, for example, a standardized Health Questionnaire Assessment (HAQ), and pain. Additional baseline evaluations include erythrocyte sedimentation rates (ESR), serum levels of C-reactive protein (CRP) and soluble IL-2 receptor (IL-2r). The clinical response to treatment is assessed using the criteria established by the American College of Rheumatology (ACR), such as the ACR20 criterion; i.e., if there was a 20 percent improvement in tender and swollen joint counts and 20 percent improvement in three of the five remaining symptoms measured, such as patient and physician global disease changes, pain, disability, and an acute phase reactant (Felson, D. T., et al., 1993 Arthritis and Rheumatism 36:729-740; Felson, D. T., et al., 1995 Arthritis and Rheumatism 38:1-9) Similarly, a subject would satisfy the ACR50 or ACR70 criterion if there was a 50 or 70 percent improvement, respectively, in tender and swollen joint counts and 50 or 70 percent improvement, respectively, in three of the five remaining symptoms measured, such as patient and physician global disease changes, pain, physical disability, and an acute phase reactant such as CRP or ESR. In addition, potential biomarkers of disease activity are measured, including rheumatoid factor, CRP, ESR, soluble IL-2R, soluble ICAM-1, soluble E-selectin, and MMP-3. Efficacy outcomes would be determined using standard statistical methods. Toxicity and adverse event markers would also be followed in this study to verify that the compound is safe when used in the manner described.

[0399] Clinical Trial in Acute Coronary Syndrome and Acute Myocardial Infarction.

[0400] A phase III trial in acute coronary syndrome (ACS) and/or acute myocardial infarction (AMI) would be conducted wherein patients diagnosed with ACS and/or AMI are administered either a BFXTEN fusion protein comprising, for example, IL-1ra and BNP, a positive control, the combination of the BFXTEN fusion protein plus a positive control substance, or a placebo daily, bi-weekly, or weekly (or other dosing schedule deemed appropriate given the pharmacokinetic and pharmacodynamic properties of the compound) for an extended period of time. The study is conducted to determine whether the BFXTEN is superior to the other treatment regimens for preventing cardiovascular death, non-fatal myocardial infarction, or ischemic stroke in subjects with a recent acute coronary syndrome. Patients are evaluated for baseline symptoms of disease activity prior to receiving any treatments, including signs or symptoms of unstable angina, chest pain experienced as tightness around the chest radiating to the left arm and the left angle of the jaw, diaphoresis (sweating), nausea and vomiting, shortness of breath, as well as electrocardiogram (ECG) evidence of non-Q-wave myocardial infarction and Q-wave myocardial infarction. Additional baseline evaluations include measurement of biomarkers, including ischemia-modified albumin (IMA), myeloperoxidase (MPO), glycogen phosphorylase isoenzyme BB-(GPBB), troponin, natriuretic peptide (both B-type natriuretic peptide (BNP) and N-terminal Pro BNP), and monocyte chemo attractive protein (MCP)-1. The clinical response to treatment is assessed using time to first occurrence of cardiovascular death, myocardial infarction, or ischemic stroke as primary outcome measures, while occurrences of or time to first unstable angina, hemorrhagic stroke, or fatal bleeding could serve as secondary outcome measures. Efficacy outcomes would be determined using standard statistical methods. Toxicity and adverse event markers are followed in this study to verify that the compound is safe when used in the manner described.

### Example 27

### Characterization of BP-XTEN Secondary Structure

[0401] The fusion protein Ex4-XTEN_AE864 was evaluated for degree of secondary structure by circular dichroism spectroscopy. CD spectroscopy was performed on a Jasco J-715 (Jasco Corporation, Tokyo, Japan) spectropolarimeter equipped with Jasco Peltier temperature controller (TPC-348WI). The concentration of protein was adjusted to 0.2 mg/mL in 20 mM sodium phosphate pH 7.0, 50 mM NaCl. The experiments were carried out using HELLMA quartz cells with an optical path-length of 0.1 cm. The CD spectra were acquired at 5°, 25°, 45°, and 65° C. and processed using the J-700 version 1.08.01 (Build 1) Jasco software for Windows. The samples were equilibrated at each temperature for 5 min before performing CD measurements. All spectra were recorded in duplicate from 300 nm to 185 nm using a bandwidth of 1 nm and a time constant of 2 sec, at a scan speed of 100 nm/min The CD spectrum shown in FIG. 26 shows no evidence of stable secondary structure and is consistent with an unstructured polypeptide.

### Example 28

### C-terminal XTEN releasable by Elastase-2

[0402] A fusion protein consisting of an XTEN protein fused to the C-terminus of a BP, such as exendin-4 (Ex4) can be created with a XTEN release site cleavage sequence placed in between the BP and XTEN components. In this case, the release site contains an amino acid sequence that is recognized and cleaved by the elastase-2 protease (EC 3.4.21.37, Uniprot P08246). Specifically the sequence LGPVSGVP (SEQ ID NO: 672) [Rawlings N. D., et al. (2008) Nucleic Acids Res., 36: D320], would be cut after position 4 in the sequence. Elastase is constitutively expressed by neutrophils and is present at all times in the circulation. Its activity is tightly controlled by serpins and is therefore minimally active most of the time. Therefore as the long-lived Ex4-XTEN circulates, a fraction of it would be cleaved, creating a pool of shorter-lived exendin-4 to be used in glucose homeostasis. In a desirable feature of the inventive composition, this creates a circulating pro-drug depot that constantly releases an amount of free, fully active exendin-4.

### Example 29

### C-Terminal XTEN Releasable by MMP-12

[0403] An amylin-XTEN fusion protein consisting of an XTEN protein fused to the C-terminus of amylin can be created with a XTEN release site cleavage sequence placed in between the amylin and XTEN components. In this case, the XTEN release site contains an amino acid sequence that is recognized and cleaved by the MMP-12 protease (EC 3.4.24.65, Uniprot P39900). Specifically the sequence GPAGLGGA (SEQ ID NO: 673) [Rawlings N. D., et al. (2008) Nucleic Acids Res., 36: D320] would be cut after position 4 of the sequence. MMP-12 is constitutively expressed in whole blood. Therefore as the long-lived amylin-XTEN circulates, a fraction of it would be cleaved, creating a pool of shorter-lived amylin to be used in glucose homeostasis. In a desirable feature of the inventive composition, this creates a circulating pro-drug depot that constantly releases an amount of free, fully active amylin.

### Example 30

### C-Terminal XTEN Releasable by FXIa

[0404] A glucagon fusion protein consisting of an XTEN protein fused to the N-terminus of glucagon can be created with a XTEN release site cleavage sequence placed in between the glucagon and XTEN components. In this case, the release site cleavage sequence can be incorporated into the XTEN-glucagon that contains an amino acid sequence that is recognized and cleaved by the FXIa protease (EC 3.4.21.27, Uniprot PO₃₉₅₁). Specifically the amino acid sequence KLTRAET (SEQ ID NO: 674) is cut after the arginine of the sequence by FXIa protease. FXI is the pro-coagulant protease located immediately before FVIII in the intrinsic or contact activated coagulation pathway. Active FXIa is produced from FXI by proteolytic cleavage of the zymogen by FXIIa. Production of FXIa is tightly controlled and only occurs when coagulation is necessary for proper hemostasis. Therefore, by incorporation of the KLTRAET (SEQ ID NO: 674) cleavage sequence, the XTEN domain would only be removed from glucagon concurrent with activation of the intrinsic coagulation pathway. This creates a situation where the XTEN-glucagon fusion protein is processed in one additional manner during the activation of the intrinsic pathway.

### Example 31

### Analysis of Sequences for Secondary Structure by Prediction Algorithms

[0405] Amino acid sequences can be assessed for secondary structure via certain computer programs or algorithms, such as the well-known Chou-Fasman algorithm (Chou, P. Y., et al. (1974) Biochemistry, 13: 222-45) and the Garnier-Osguthorpe-Robson, or “GOR” method (Garnier J, Gibrat J F, Robson B. (1996). GOR method for predicting protein secondary structure from amino acid sequence. Methods Enzymol 266:540-553). For a given sequence, the algorithms can predict whether there exists some or no secondary structure at all, expressed as total and/or percentage of residues of the sequence that form, for example, alpha-helices or beta-sheets or the percentage of residues of the sequence predicted to result in random coil formation.

[0406] Several representative sequences from XTEN “families” have been assessed using two algorithm tools for the Chou-Fasman and GOR methods to assess the degree of secondary structure in these sequences. The Chou-Fasman tool was provided by William R. Pearson and the University of Virginia, at the “Biosupport” internet site, URL located on the World Wide Web at fasta.bioch.virginia.edu/fasta_www2/fasta_www.cgi?rm=misc1 as it existed on Jun. 19, 2009. The GOR tool was provided by Pole Informatique Lyonnais at the Network Protein Sequence Analysis internet site, URL located on the World Wide Web at .npsa-pbil.ibcp.fr/cgi-bin/secpred_gor4.pl as it existed on Jun. 19, 2008.

[0407] As a first step in the analyses, a single XTEN sequence was analyzed by the two algorithms. The AE864 composition is a XTEN with 864 amino acid residues created from multiple copies of four 12 amino acid sequence motifs consisting of the amino acids G, S, T, E, P, and A. The sequence motifs are characterized by the fact that there is limited repetitiveness within the motifs and within the overall sequence in that the sequence of any two consecutive amino acids is not repeated more than twice in any one 12 amino acid motif, and that no three contiguous amino acids of full-length the XTEN are identical. Successively longer portions of the AF 864 sequence from the N-terminus were analyzed by the Chou-Fasman and GOR algorithms (the latter requires a minimum length of 17 amino acids). The sequences were analyzed by entering the FASTA format sequences into the prediction tools and running the analysis. The results from the analyses are presented in Table 25.

[0408] The results indicate that, by the Chou-Fasman calculations, short XTEN of the AE and AG families, up to at least 288 amino acid residues, have no alpha-helices or beta sheets, but amounts of predicted percentage of random coil by the GOR algorithm vary from 78-99%. With increasing XTEN lengths of 504 residues to greater than 1300, the XTEN analyzed by the Chou-Fasman algorithm had predicted percentages of alpha-helices or beta sheets of 0 to about 2%, while the calculated percentages of random coil increased to from 94-99%. Those XTEN with alpha-helices or beta sheets were those sequences with one or more instances of three contiguous serine residues, which resulted in predicted beta-sheet formation. However, even these sequences still had approximately 99% random coil formation.

[0409] The analysis supports the conclusion that: 1) XTEN created from multiple sequence motifs of G, S, T, E, P, and A that have limited repetitiveness as to contiguous amino acids are predicted to have very low amounts of alpha-helices and beta-sheets; 2) that increasing the length of the XTEN does not appreciably increase the probability of alpha-helix or beta-sheet formation; and 3) that progressively increasing the length of the XTEN sequence by addition of non-repetitive 12-mers consisting of the amino acids G, S, T, E, P, and A results in increased percentage of random coil formation. Based on the numerous sequences evaluated by these methods, it is concluded that XTEN created from sequence motifs of G, S, T, E, P, and A that have limited repetitiveness (defined as no more than two identical contiguous amino acids in any one motif) are expected to have very limited secondary structure. With the exception of motifs containing three contiguous serines, it is believed that any order or combination of sequence motifs from Table 3 can be used to create an XTEN polypeptide that will result in an XTEN sequence that is substantially devoid of secondary structure, and that the effects of three contiguous serines is ameliorated by increasing the length of the XTEN. Such sequences are expected to have the characteristics described in the BFXTEN embodiments of the invention disclosed herein.

TABLE 25
CHOU-FASMAN and GOR prediction calculations of polypeptide sequences

| | | SEQ | | | |
|---|---|---|---|---|---|
| SEQ | | ID | No. | Chou-Fasman | GOR |
| NAME | Sequence | NO: | Residues | Calculation | Calculation |
| AE36: | GSPAGSPTSTEEGTSESATPESGPGT | 675 | 36 | Residue totals: H: 0 E: 0 | 94.44% |
| LCW0402_{—} | STEPSEGSAP | | | percent: H: 0.0 E: 0.0 | |
| 002 | | | | | |
| AE36: | GTSTEPSEGSAPGTSTEPSEGSAPGT | 676 | 36 | Residue totals: H: 0 E: 0 | 94.44% |
| LCW0402_{—} | STEPSEGSAP | | | percent: H: 0.0 E: 0.0 | |
| 003 | | | | | |
| AG36: | GASPGTSSTGSPGTPGSGTASSSPGS | 677 | 36 | Residue totals: H: 0 E: 0 | 77.78% |
| LCW0404_{—} | STPSGATGSP | | | percent: H: 0.0 E: 0.0 | |
| 001 | | | | | |
| AG36: | GSSTPSGATGSPGSSPSASTGTGPGS | 678 | 36 | Residue totals: H: 0 E: 0 | 83.33% |
| LCW0404_{—} | STPSGATGSP | | | percent: H: 0.0 E: 0.0 | |
| 003 | | | | | |
| AE42_1 | TEPSEGSAPGSPAGSPTSTEEGTSES | 679 | 42 | Residue totals: H: 0 E: 0 | 90.48% |
| | ATPESGPGSEPATSGS | | | percent: H: 0.0 E: 0.0 | |
| AE42_1 | TEPSEGSAPGSPAGSPTSTEEGTSES | 680 | 42 | Residue totals: H: 0 E: 0 | 90.48% |
| | ATPESGPGSEPATSGS | | | percent: H: 0.0 E: 0.0 | |
| AG42_1 | GAPSPSASTGTGPGTPGSGTASSSPG | 681 | 42 | Residue totals: H: 0 E: 0 | 88.10% |
| | SSTPSGATGSPGPSGP | | | percent: H: 0.0 E: 0.0 | |
| AG42_2 | GPGTPGSGTASSSPGSSTPSGATGSP | 682 | 42 | Residue totals: H: 0 E: 0 | 88.10% |
| | GSSPSASTGTGPGASP | | | percent: H: 0.0 E: 0.0 | |
| AE144 | GSEPATSGSETPGTSESATPESGPGS | 683 | 144 | Residue totals: H: 0 E: 0 | 98.61% |
| | EPATSGSETPGSPAGSPTSTEEGTST | | | percent: H: 0.0 E: 0.0 | |
| | EPSEGSAPGSEPATSGSETPGSEPAT | | | | |
| | SGSETPGSEPATSGSETPGTSTEPSE | | | | |
| | GSAPGTSESATPESGPGSEPATSGSE | | | | |
| | TPGTSTEPSEGSAP | | | | |
| AG144_1 | PGSSPSASTGTGPGSSPSASTGTGPG | 684 | 144 | Residue totals: H: 0 E: 0 | 91.67% |
| | TPGSGTASSSPGSSTPSGATGSPGSS | | | percent: H: 0.0 E: 0.0 | |
| | PSASTGTGPGASPGTSSTGSPGTPGS | | | | |
| | GTASSSPGSSTPSGATGSPGTPGSGT | | | | |
| | ASSSPGASPGTSSTGSPGASPGTSST | | | | |
| | GSPGTPGSGTASSS | | | | |
| AE288 | GTSESATPESGPGSEPATSGSETPGT | 685 | 288 | Residue totals: H: 0 E: 0 | 99.31% |
| | SESATPESGPGSEPATSGSETPGTSE | | | percent: H: 0.0 E: 0.0 | |
| | SATPESGPGTSTEPSEGSAPGSPAGS | | | | |
| | PTSTEEGTSESATPESGPGSEPATSG | | | | |
| | SETPGTSESATPESGPGSPAGSPTST | | | | |
| | EEGSPAGSPTSTEEGTSTEPSEGSAP | | | | |
| | GTSESATPESGPGTSESATPESGPGT | | | | |
| | SESATPESGPGSEPATSGSETPGSEP | | | | |
| | ATSGSETPGSPAGSPTSTEEGTSTEP | | | | |
| | SEGSAPGTSTEPSEGSAPGSEPATSG | | | | |
| | SETPGTSESATPESGPGTSTEPSEGS | | | | |
| | AP | | | | |
| AG288_2 | GSSPSASTGTGPGSSPSASTGTGPGT | 686 | 288 | Residue totals: H: 0 E: 0 | 92.71 |
| | PGSGTASSSPGSSTPSGATGSPGSSP | | | percent: H: 0.0 E: 0.0 | |
| | SASTGTGPGASPGTSSTGSPGTPGSG | | | | |
| | TASSSPGSSTPSGATGSPGTPGSGTA | | | | |
| | SSSPGASPGTSSTGSPGASPGTSSTG | | | | |
| | SPGTPGSGTASSSPGSSTPSGATGSP | | | | |
| | GASPGTSSTGSPGTPGSGTASSSPGS | | | | |
| | STPSGATGSPGSSPSASTGTGPGSSP | | | | |
| | SASTGTGPGSSTPSGATGSPGSSTPS | | | | |
| | GATGSPGASPGTSSTGSPGASPGTSS | | | | |
| | TGSPGASPGTSSTGSPGTPGSGTASS | | | | |
| | SP | | | | |
| AF504 | GASPGTSSTGSPGSSPSASTGTGPGS | 687 | 504 | Residue totals: H: 0 E: 0 | 94.44% |
| | SPSASTGTGPGTPGSGTASSSPGSST | | | percent: H: 0.0 E: 0.0 | |
| | PSGATGSPGSNPSASTGTGPGASPG | | | | |
| | TSSTGSPGTPGSGTASSSPGSSTPSG | | | | |
| | ATGSPGTPGSGTASSSPGASPGTSST | | | | |
| | GSPGASPGTSSTGSPGTPGSGTASSS | | | | |
| | PGSSTPSGATGSPGASPGTSSTGSPG | | | | |
| | TPGSGTASSSPGSSTPSGATGSPGSN | | | | |
| | PSASTGTGPGSSPSASTGTGPGSSTP | | | | |
| | SGATGSPGSSTPSGATGSPGASPGTS | | | | |
| | STGSPGASPGTSSTGSPGASPGTSST | | | | |
| | GSPGTPGSGTASSSPGASPGTSSTGS | | | | |
| | PGASPGTSSTGSPGASPGTSSTGSPG | | | | |
| | SSPSASTGTGPGTPGSGTASSSPGAS | | | | |
| | PGTSSTGSPGASPGTSSTGSPGASPG | | | | |
| | TSSTGSPGSSTPSGATGSPGSSTPSG | | | | |
| | ATGSPGASPGTSSTGSPGTPGSGTAS | | | | |
| | SSPGSSTPSGATGSPGSSTPSGATGS | | | | |
| | PGSSTPSGATGSPGSSPSASTGTGPG | | | | |
| | ASPGTSSTGSP | | | | |
| AD 576 | GSSESGSSEGGPGSGGEPSESGSSGS | 688 | 576 | Residue totals: H: 7 E: 0 | 99.65% |
| | SESGSSEGGPGSSESGSSEGGPGSSE | | | percent: H: 1.2 E: 0.0 | |
| | SGSSEGGPGSSESGSSEGGPGSSESG | | | | |
| | SSEGGPGESPGGSSGSESGSEGSSGP | | | | |
| | GESSGSSESGSSEGGPGSSESGSSEG | | | | |
| | GPGSSESGSSEGGPGSGGEPSESGSS | | | | |
| | GESPGGSSGSESGESPGGSSGSESGS | | | | |
| | GGEPSESGSSGSSESGSSEGGPGSGG | | | | |
| | EPSESGSSGSGGEPSESGSSGSEGSS | | | | |
| | GPGESSGESPGGSSGSESGSGGEPSE | | | | |
| | SGSSGSGGEPSESGSSGSGGEPSESG | | | | |
| | SSGSSESGSSEGGPGESPGGSSGSES | | | | |
| | GESPGGSSGSESGESPGGSSGSESGE | | | | |
| | SPGGSSGSESGESPGGSSGSESGSSE | | | | |
| | SGSSEGGPGSGGEPSESGSSGSEGSS | | | | |
| | GPGESSGSSESGSSEGGPGSGGEPSE | | | | |
| | SGSSGSSESGSSEGGPGSGGEPSESG | | | | |
| | SSGESPGGSSGSESGESPGGSSGSES | | | | |
| | GSSESGSSEGGPGSGGEPSESGSSGS | | | | |
| | SESGSSEGGPGSGGEPSESGSSGSGG | | | | |
| | EPSESGSSGESPGGSSGSESGSEGSS | | | | |
| | GPGESSGSSESGSSEGGPGSEGSSGP | | | | |
| | GESS | | | | |
| AE576 | GSPAGSPTSTEEGTSESATPESGPGT | 689 | 576 | Residue totals: H: 2 E: 0 | 99.65% |
| | STEPSEGSAPGSPAGSPTSTEEGTST | | | percent: H: 0.4 E: 0.0 | |
| | EPSEGSAPGTSTEPSEGSAPGTSESA | | | | |
| | TPESGPGSEPATSGSETPGSEPATSG | | | | |
| | SETPGSPAGSPTSTEEGTSESATPES | | | | |
| | GPGTSTEPSEGSAPGTSTEPSEGSAP | | | | |
| | GSPAGSPTSTEEGTSTEPSEGSAPGT | | | | |
| | STEPSEGSAPGTSESATPESGPGTST | | | | |
| | EPSEGSAPGTSESATPESGPGSEPAT | | | | |
| | SGSETPGTSTEPSEGSAPGTSTEPSE | | | | |
| | GSAPGTSESATPESGPGTSESATPES | | | | |
| | GPGSPAGSPTSTEEGTSESATPESGP | | | | |
| | GSEPATSGSETPGTSESATPESGPGT | | | | |
| | STEPSEGSAPGTSTEPSEGSAPGTST | | | | |
| | EPSEGSAPGTSTEPSEGSAPGTSTEP | | | | |
| | SEGSAPGTSTEPSEGSAPGSPAGSPT | | | | |
| | STEEGTSTEPSEGSAPGTSESATPES | | | | |
| | GPGSEPATSGSETPGTSESATPESGP | | | | |
| | GSEPATSGSETPGTSESATPESGPGT | | | | |
| | STEPSEGSAPGTSESATPESGPGSPA | | | | |
| | GSPTSTEEGSPAGSPTSTEEGSPAGS | | | | |
| | PTSTEEGTSESATPESGPGTSTEPSE | | | | |
| | GSAP | | | | |
| AG576 | PGTPGSGTASSSPGSSTPSGATGSPG | 690 | 576 | Residue totals: H: 0 E: 3 | 99.31% |
| | SSPSASTGTGPGSSPSASTGTGPGSS | | | percent: H: 0.4 E: 0.5 | |
| | TPSGATGSPGSSTPSGATGSPGASPG | | | | |
| | TSSTGSPGASPGTSSTGSPGASPGTS | | | | |
| | STGSPGTPGSGTASSSPGASPGTSST | | | | |
| | GSPGASPGTSSTGSPGASPGTSSTGS | | | | |
| | PGSSPSASTGTGPGTPGSGTASSSPG | | | | |
| | ASPGTSSTGSPGASPGTSSTGSPGAS | | | | |
| | PGTSSTGSPGSSTPSGATGSPGSSTPS | | | | |
| | GATGSPGASPGTSSTGSPGTPGSGT | | | | |
| | ASSSPGSSTPSGATGSPGSSTPSGAT | | | | |
| | GSPGSSTPSGATGSPGSSPSASTGTG | | | | |
| | PGASPGTSSTGSPGASPGTSSTGSPG | | | | |
| | TPGSGTASSSPGASPGTSSTGSPGAS | | | | |
| | PGTSSTGSPGASPGTSSTGSPGASPG | | | | |
| | TSSTGSPGTPGSGTASSSPGSSTPSG | | | | |
| | ATGSPGTPGSGTASSSPGSSTPSGAT | | | | |
| | GSPGTPGSGTASSSPGSSTPSGATGS | | | | |
| | PGSSTPSGATGSPGSSPSASTGTGPG | | | | |
| | SSPSASTGTGPGASPGTSSTGSPGTP | | | | |
| | GSGTASSSPGSSTPSGATGSPGSSPS | | | | |
| | ASTGTGPGSSPSASTGTGPGASPGTS | | | | |
| | STGS | | | | |
| AF540 | GSTSSTAESPGPGSTSSTAESPGPGS | 691 | 540 | Residue totals: H: 2 E: 0 | 99.65 |
| | TSESPSGTAPGSTSSTAESPGPGSTSS | | | percent: H: 0.4 E: 0.0 | |
| | TAESPGPGTSTPESGSASPGSTSESPS | | | | |
| | GTAPGTSPSGESSTAPGSTSESPSGT | | | | |
| | APGSTSESPSGTAPGTSPSGESSTAP | | | | |
| | GSTSESPSGTAPGSTSESPSGTAPGT | | | | |
| | SPSGESSTAPGSTSESPSGTAPGSTSE | | | | |
| | SPSGTAPGSTSESPSGTAPGTSTPES | | | | |
| | GSASPGSTSESPSGTAPGTSTPESGS | | | | |
| | ASPGSTSSTAESPGPGSTSSTAESPG | | | | |
| | PGTSTPESGSASPGTSTPESGSASPG | | | | |
| | STSESPSGTAPGTSTPESGSASPGTST | | | | |
| | PESGSASPGSTSESPSGTAPGSTSESP | | | | |
| | SGTAPGSTSESPSGTAPGSTSSTAES | | | | |
| | PGPGTSTPESGSASPGTSTPESGSAS | | | | |
| | PGSTSESPSGTAPGSTSESPSGTAPG | | | | |
| | TSTPESGSASPGSTSESPSGTAPGSTS | | | | |
| | ESPSGTAPGTSTPESGSASPGTSPSG | | | | |
| | ESSTAPGSTSSTAESPGPGTSPSGESS | | | | |
| | TAPGSTSSTAESPGPGTSTPESGSAS | | | | |
| | PGSTSESPSGTAP | | | | |
| AD836 | GSSESGSSEGGPGSSESGSSEGGPGE | 692 | 836 | Residue totals: H: 0 E: 0 | 98.44% |
| | SPGGSSGSESGSGGEPSESGSSGESP | | | percent: H: 0.0 E: 0.0 | |
| | GGSSGSESGESPGGSSGSESGSSESG | | | | |
| | SSEGGPGSSESGSSEGGPGSSESGSS | | | | |
| | EGGPGESPGGSSGSESGESPGGSSGS | | | | |
| | ESGESPGGSSGSESGSSESGSSEGGP | | | | |
| | GSSESGSSEGGPGSSESGSSEGGPGS | | | | |
| | SESGSSEGGPGSSESGSSEGGPGSSE | | | | |
| | SGSSEGGPGSGGEPSESGSSGESPGG | | | | |
| | SSGSESGESPGGSSGSESGSGGEPSE | | | | |
| | SGSSGSEGSSGPGESSGSSESGSSEG | | | | |
| | GPGSGGEPSESGSSGSEGSSGPGESS | | | | |
| | GSSESGSSEGGPGSGGEPSESGSSGE | | | | |
| | SPGGSSGSESGSGGEPSESGSSGSGG | | | | |
| | EPSESGSSGSSESGSSEGGPGSGGEP | | | | |
| | SESGSSGSGGEPSESGSSGSEGSSGP | | | | |
| | GESSGESPGGSSGSESGSEGSSGPGE | | | | |
| | SSGSEGSSGPGESSGSGGEPSESGSS | | | | |
| | GSSESGSSEGGPGSSESGSSEGGPGE | | | | |
| | SPGGSSGSESGSGGEPSESGSSGSEG | | | | |
| | SSGPGESSGESPGGSSGSESGSEGSS | | | | |
| | GPGSSESGSSEGGPGSGGEPSESGSS | | | | |
| | GSEGSSGPGESSGSEGSSGPGESSGS | | | | |
| | EGSSGPGESSGSGGEPSESGSSGSGG | | | | |
| | EPSESGSSGESPGGSSGSESGESPGG | | | | |
| | SSGSESGSGGEPSESGSSGSEGSSGP | | | | |
| | GESSGESPGGSSGSESGSSESGSSEG | | | | |
| | GPGSSESGSSEGGPGSSESGSSEGGP | | | | |
| | GSGGEPSESGSSGSSESGSSEGGPGE | | | | |
| | SPGGSSGSESGSGGEPSESGSSGSSE | | | | |
| | SGSSEGGPGESPGGSSGSESGSGGEP | | | | |
| | SESGSSGESPGGSSGSESGSGGEPSE | | | | |
| | SGSS | | | | |
| AE864 | GSPAGSPTSTEEGTSESATPESGPGT | 693 | 864 | Residue totals: H: 2 E: 3 | 99.77% |
| | STEPSEGSAPGSPAGSPTSTEEGTST | | | percent: H: 0.2 E: 0.4 | |
| | EPSEGSAPGTSTEPSEGSAPGTSESA | | | | |
| | TPESGPGSEPATSGSETPGSEPATSG | | | | |
| | SETPGSPAGSPTSTEEGTSESATPES | | | | |
| | GPGTSTEPSEGSAPGTSTEPSEGSAP | | | | |
| | GSPAGSPTSTEEGTSTEPSEGSAPGT | | | | |
| | STEPSEGSAPGTSESATPESGPGTST | | | | |
| | EPSEGSAPGTSESATPESGPGSEPAT | | | | |
| | SGSETPGTSTEPSEGSAPGTSTEPSE | | | | |
| | GSAPGTSESATPESGPGTSESATPES | | | | |
| | GPGSPAGSPTSTEEGTSESATPESGP | | | | |
| | GSEPATSGSETPGTSESATPESGPGT | | | | |
| | STEPSEGSAPGTSTEPSEGSAPGTST | | | | |
| | EPSEGSAPGTSTEPSEGSAPGTSTEP | | | | |
| | SEGSAPGTSTEPSEGSAPGSPAGSPT | | | | |
| | STEEGTSTEPSEGSAPGTSESATPES | | | | |
| | GPGSEPATSGSETPGTSESATPESGP | | | | |
| | GSEPATSGSETPGTSESATPESGPGT | | | | |
| | STEPSEGSAPGTSESATPESGPGSPA | | | | |
| | GSPTSTEEGSPAGSPTSTEEGSPAGS | | | | |
| | PTSTEEGTSESATPESGPGTSTEPSE | | | | |
| | GSAPGTSESATPESGPGSEPATSGSE | | | | |
| | TPGTSESATPESGPGSEPATSGSETP | | | | |
| | GTSESATPESGPGTSTEPSEGSAPGS | | | | |
| | PAGSPTSTEEGTSESATPESGPGSEP | | | | |
| | ATSGSETPGTSESATPESGPGSPAGS | | | | |
| | PTSTEEGSPAGSPTSTEEGTSTEPSE | | | | |
| | GSAPGTSESATPESGPGTSESATPES | | | | |
| | GPGTSESATPESGPGSEPATSGSETP | | | | |
| | GSEPATSGSETPGSPAGSPTSTEEGT | | | | |
| | STEPSEGSAPGTSTEPSEGSAPGSEP | | | | |
| | ATSGSETPGTSESATPESGPGTSTEP | | | | |
| | SEGSAP | | | | |
| AF864 | GSTSESPSGTAPGTSPSGESSTAPGS | 694 | 875 | Residue totals: H: 2 E: 0 | 95.20% |
| | TSESPSGTAPGSTSESPSGTAPGTSTP | | | percent: H: 0.2 E: 0.0 | |
| | ESGSASPGTSTPESGSASPGSTSESPS | | | | |
| | GTAPGSTSESPSGTAPGTSPSGESST | | | | |
| | APGSTSESPSGTAPGTSPSGESSTAP | | | | |
| | GTSPSGESSTAPGSTSSTAESPGPGT | | | | |
| | SPSGESSTAPGTSPSGESSTAPGSTSS | | | | |
| | TAESPGPGTSTPESGSASPGTSTPES | | | | |
| | GSASPGSTSESPSGTAPGSTSESPSG | | | | |
| | TAPGTSTPESGSASPGSTSSTAESPG | | | | |
| | PGTSTPESGSASPGSTSESPSGTAPG | | | | |
| | TSPSGESSTAPGSTSSTAESPGPGTSP | | | | |
| | SGESSTAPGTSTPESGSASPGSTSST | | | | |
| | AESPGPGSTSSTAESPGPGSTSSTAE | | | | |
| | SPGPGSTSSTAESPGPGTSPSGESST | | | | |
| | APGSTSESPSGTAPGSTSESPSGTAP | | | | |
| | GTSTPESGPXXXGASASGAPSTXXX | | | | |
| | XSESPSGTAPGSTSESPSGTAPGSTS | | | | |
| | ESPSGTAPGSTSESPSGTAPGSTSESP | | | | |
| | SGTAPGSTSESPSGTAPGTSTPESGS | | | | |
| | ASPGTSPSGESSTAPGTSPSGESSTA | | | | |
| | PGSTSSTAESPGPGTSPSGESSTAPG | | | | |
| | TSTPESGSASPGSTSESPSGTAPGSTS | | | | |
| | ESPSGTAPGTSPSGESSTAPGSTSESP | | | | |
| | SGTAPGTSTPESGSASPGTSTPESGS | | | | |
| | ASPGSTSESPSGTAPGTSTPESGSAS | | | | |
| | PGSTSSTAESPGPGSTSESPSGTAPG | | | | |
| | STSESPSGTAPGTSPSGESSTAPGSTS | | | | |
| | STAESPGPGTSPSGESSTAPGTSTPES | | | | |
| | GSASPGTSPSGESSTAPGTSPSGESS | | | | |
| | TAPGTSPSGESSTAPGSTSSTAESPG | | | | |
| | PGSTSSTAESPGPGTSPSGESSTAPG | | | | |
| | SSPSASTGTGPGSSTPSGATGSPGSS | | | | |
| | TPSGATGSP | | | | |
| AG864 | GASPGTSSTGSPGSSPSASTGTGPGS | 695 | 864 | Residue totals: H: 0 E: 0 | 94.91% |
| | SPSASTGTGPGTPGSGTASSSPGSST | | | percent: H: 0.0 E: 0.0 | |
| | PSGATGSPGSSPSASTGTGPGASPGT | | | | |
| | SSTGSPGTPGSGTASSSPGSSTPSGA | | | | |
| | TGSPGTPGSGTASSSPGASPGTSSTG | | | | |
| | SPGASPGTSSTGSPGTPGSGTASSSP | | | | |
| | GSSTPSGATGSPGASPGTSSTGSPGT | | | | |
| | PGSGTASSSPGSSTPSGATGSPGSSP | | | | |
| | SASTGTGPGSSPSASTGTGPGSSTPS | | | | |
| | GATGSPGSSTPSGATGSPGASPGTSS | | | | |
| | TGSPGASPGTSSTGSPGASPGTSSTG | | | | |
| | SPGTPGSGTASSSPGASPGTSSTGSP | | | | |
| | GASPGTSSTGSPGASPGTSSTGSPGS | | | | |
| | SPSASTGTGPGTPGSGTASSSPGASP | | | | |
| | GTSSTGSPGASPGTSSTGSPGASPGT | | | | |
| | SSTGSPGSSTPSGATGSPGSSTPSGA | | | | |
| | TGSPGASPGTSSTGSPGTPGSGTASS | | | | |
| | SPGSSTPSGATGSPGSSTPSGATGSP | | | | |
| | GSSTPSGATGSPGSSPSASTGTGPGA | | | | |
| | SPGTSSTGSPGASPGTSSTGSPGTPG | | | | |
| | SGTASSSPGASPGTSSTGSPGASPGT | | | | |
| | SSTGSPGASPGTSSTGSPGASPGTSS | | | | |
| | TGSPGTPGSGTASSSPGSSTPSGATG | | | | |
| | SPGTPGSGTASSSPGSSTPSGATGSP | | | | |
| | GTPGSGTASSSPGSSTPSGATGSPGS | | | | |
| | STPSGATGSPGSSPSASTGTGPGSSP | | | | |
| | SASTGTGPGASPGTSSTGSPGTPGSG | | | | |
| | TASSSPGSSTPSGATGSPGSSPSAST | | | | |
| | GTGPGSSPSASTGTGPGASPGTSSTG | | | | |
| | SPGASPGTSSTGSPGSSTPSGATGSP | | | | |
| | GSSPSASTGTGPGASPGTSSTGSPGS | | | | |
| | SPSASTGTGPGTPGSGTASSSPGSST | | | | |
| | PSGATGSPGSSTPSGATGSPGASPGT | | | | |
| | SSTGSP | | | | |
| AM875 | GTSTEPSEGSAPGSEPATSGSETPGS | 696 | 875 | Residue totals: H: 7 E: 3 | 98.63% |
| | PAGSPTSTEEGSTSSTAESPGPGTST | | | percent: H: 0.8 E: 0.3 | |
| | PESGSASPGSTSESPSGTAPGSTSESP | | | | |
| | SGTAPGTSTPESGSASPGTSTPESGS | | | | |
| | ASPGSEPATSGSETPGTSESATPESG | | | | |
| | PGSPAGSPTSTEEGTSTEPSEGSAPG | | | | |
| | TSESATPESGPGTSTEPSEGSAPGTS | | | | |
| | TEPSEGSAPGSPAGSPTSTEEGTSTE | | | | |
| | PSEGSAPGTSTEPSEGSAPGTSESAT | | | | |
| | PESGPGTSESATPESGPGTSTEPSEG | | | | |
| | SAPGTSTEPSEGSAPGTSESATPESG | | | | |
| | PGTSTEPSEGSAPGSEPATSGSETPG | | | | |
| | SPAGSPTSTEEGSSTPSGATGSPGTP | | | | |
| | GSGTASSSPGSSTPSGATGSPGTSTE | | | | |
| | PSEGSAPGTSTEPSEGSAPGSEPATS | | | | |
| | GSETPGSPAGSPTSTEEGSPAGSPTS | | | | |
| | TEEGTSTEPSEGSAPGASASGAPSTG | | | | |
| | GTSESATPESGPGSPAGSPTSTEEGS | | | | |
| | PAGSPTSTEEGSTSSTAESPGPGSTS | | | | |
| | ESPSGTAPGTSPSGESSTAPGTPGSG | | | | |
| | TASSSPGSSTPSGATGSPGSSPSAST | | | | |
| | GTGPGSEPATSGSETPGTSESATPES | | | | |
| | GPGSEPATSGSETPGSTSSTAESPGP | | | | |
| | GSTSSTAESPGPGTSPSGESSTAPGS | | | | |
| | EPATSGSETPGSEPATSGSETPGTST | | | | |
| | EPSEGSAPGSTSSTAESPGPGTSTPES | | | | |
| | GSASPGSTSESPSGTAPGTSTEPSEG | | | | |
| | SAPGTSTEPSEGSAPGTSTEPSEGSA | | | | |
| | PGSSTPSGATGSPGSSPSASTGTGPG | | | | |
| | ASPGTSSTGSPGSEPATSGSETPGTS | | | | |
| | ESATPESGPGSPAGSPTSTEEGSSTPS | | | | |
| | GATGSPGSSPSASTGTGPGASPGTSS | | | | |
| | TGSPGTSESATPESGPGTSTEPSEGS | | | | |
| | APGTSTEPSEGSAP | | | | |
| AM1318 | GTSTEPSEGSAPGSEPATSGSETPGS | 697 | 1318 | Residue totals: H: 7 E: 0 | 99.17% |
| | PAGSPTSTEEGSTSSTAESPGPGTST | | | percent: H: 0.7 E: 0.0 | |
| | PESGSASPGSTSESPSGTAPGSTSESP | | | | |
| | SGTAPGTSTPESGSASPGTSTPESGS | | | | |
| | ASPGSEPATSGSETPGTSESATPESG | | | | |
| | PGSPAGSPTSTEEGTSTEPSEGSAPG | | | | |
| | TSESATPESGPGTSTEPSEGSAPGTS | | | | |
| | TEPSEGSAPGSPAGSPTSTEEGTSTE | | | | |
| | PSEGSAPGTSTEPSEGSAPGTSESAT | | | | |
| | PESGPGTSESATPESGPGTSTEPSEG | | | | |
| | SAPGTSTEPSEGSAPGTSESATPESG | | | | |
| | PGTSTEPSEGSAPGSEPATSGSETPG | | | | |
| | SPAGSPTSTEEGSSTPSGATGSPGTP | | | | |
| | GSGTASSSPGSSTPSGATGSPGTSTE | | | | |
| | PSEGSAPGTSTEPSEGSAPGSEPATS | | | | |
| | GSETPGSPAGSPTSTEEGSPAGSPTS | | | | |
| | TEEGTSTEPSEGSAPGPEPTGPAPSG | | | | |
| | GSEPATSGSETPGTSESATPESGPGS | | | | |
| | PAGSPTSTEEGTSESATPESGPGSPA | | | | |
| | GSPTSTEEGSPAGSPTSTEEGTSESA | | | | |
| | TPESGPGSPAGSPTSTEEGSPAGSPT | | | | |
| | STEEGSTSSTAESPGPGSTSESPSGT | | | | |
| | APGTSPSGESSTAPGSTSESPSGTAP | | | | |
| | GSTSESPSGTAPGTSPSGESSTAPGT | | | | |
| | STEPSEGSAPGTSESATPESGPGTSE | | | | |
| | SATPESGPGSEPATSGSETPGTSESA | | | | |
| | TPESGPGTSESATPESGPGTSTEPSE | | | | |
| | GSAPGTSESATPESGPGTSTEPSEGS | | | | |
| | APGTSPSGESSTAPGTSPSGESSTAP | | | | |
| | GTSPSGESSTAPGTSTEPSEGSAPGS | | | | |
| | PAGSPTSTEEGTSTEPSEGSAPGSSPS | | | | |
| | ASTGTGPGSSTPSGATGSPGSSTPSG | | | | |
| | ATGSPGSSTPSGATGSPGSSTPSGAT | | | | |
| | GSPGASPGTSSTGSPGASASGAPSTG | | | | |
| | GTSPSGESSTAPGSTSSTAESPGPGT | | | | |
| | SPSGESSTAPGTSESATPESGPGTST | | | | |
| | EPSEGSAPGTSTEPSEGSAPGSSPSA | | | | |
| | STGTGPGSSTPSGATGSPGASPGTSS | | | | |
| | TGSPGTSTPESGSASPGTSPSGESST | | | | |
| | APGTSPSGESSTAPGTSESATPESGP | | | | |
| | GSEPATSGSETPGTSTEPSEGSAPGS | | | | |
| | TSESPSGTAPGSTSESPSGTAPGTSTP | | | | |
| | ESGSASPGSPAGSPTSTEEGTSESAT | | | | |
| | PESGPGTSTEPSEGSAPGSPAGSPTS | | | | |
| | TEEGTSESATPESGPGSEPATSGSET | | | | |
| | PGSSTPSGATGSPGASPGTSSTGSPG | | | | |
| | SSTPSGATGSPGSTSESPSGTAPGTS | | | | |
| | PSGESSTAPGSTSSTAESPGPGSSTPS | | | | |
| | GATGSPGASPGTSSTGSPGTPGSGT | | | | |
| | ASSSPGSPAGSPTSTEEGSPAGSPTS | | | | |
| | TEEGTSTEPSEGSAP | | | | |
| AM923 | MAEPAGSPTSTEEGASPGTSSTGSP | 698 | 924 | Residue totals: H: 4 E: 3 | 98.70% |
| | GSSTPSGATGSPGSSTPSGATGSPGT | | | percent: H: 0.4 E: 0.3 | |
| | STEPSEGSAPGSEPATSGSETPGSPA | | | | |
| | GSPTSTEEGSTSSTAESPGPGTSTPES | | | | |
| | GSASPGSTSESPSGTAPGSTSESPSG | | | | |
| | TAPGTSTPESGSASPGTSTPESGSAS | | | | |
| | PGSEPATSGSETPGTSESATPESGPG | | | | |
| | SPAGSPTSTEEGTSTEPSEGSAPGTS | | | | |
| | ESATPESGPGTSTEPSEGSAPGTSTE | | | | |
| | PSEGSAPGSPAGSPTSTEEGTSTEPS | | | | |
| | EGSAPGTSTEPSEGSAPGTSESATPE | | | | |
| | SGPGTSESATPESGPGTSTEPSEGSA | | | | |
| | PGTSTEPSEGSAPGTSESATPESGPG | | | | |
| | TSTEPSEGSAPGSEPATSGSETPGSP | | | | |
| | AGSPTSTEEGSSTPSGATGSPGTPGS | | | | |
| | GTASSSPGSSTPSGATGSPGTSTEPS | | | | |
| | EGSAPGTSTEPSEGSAPGSEPATSGS | | | | |
| | ETPGSPAGSPTSTEEGSPAGSPTSTE | | | | |
| | EGTSTEPSEGSAPGASASGAPSTGG | | | | |
| | TSESATPESGPGSPAGSPTSTEEGSP | | | | |
| | AGSPTSTEEGSTSSTAESPGPGSTSE | | | | |
| | SPSGTAPGTSPSGESSTAPGTPGSGT | | | | |
| | ASSSPGSSTPSGATGSPGSSPSASTG | | | | |
| | TGPGSEPATSGSETPGTSESATPESG | | | | |
| | PGSEPATSGSETPGSTSSTAESPGPG | | | | |
| | STSSTAESPGPGTSPSGESSTAPGSEP | | | | |
| | ATSGSETPGSEPATSGSETPGTSTEP | | | | |
| | SEGSAPGSTSSTAESPGPGTSTPESG | | | | |
| | SASPGSTSESPSGTAPGTSTEPSEGS | | | | |
| | APGTSTEPSEGSAPGTSTEPSEGSAP | | | | |
| | GSSTPSGATGSPGSSPSASTGTGPGA | | | | |
| | SPGTSSTGSPGSEPATSGSETPGTSES | | | | |
| | ATPESGPGSPAGSPTSTEEGSSTPSG | | | | |
| | ATGSPGSSPSASTGTGPGASPGTSST | | | | |
| | GSPGTSESATPESGPGTSTEPSEGSA | | | | |
| | PGTSTEPSEGSAP | | | | |
| AE912 | MAEPAGSPTSTEEGTPGSGTASSSP | 699 | 913 | Residue totals: H: 8 E: 3 | 99.45% |
| | GSSTPSGATGSPGASPGTSSTGSPGS | | | percent: H: 0.9 E: 0.3 | |
| | PAGSPTSTEEGTSESATPESGPGTST | | | | |
| | EPSEGSAPGSPAGSPTSTEEGTSTEP | | | | |
| | SEGSAPGTSTEPSEGSAPGTSESATP | | | | |
| | ESGPGSEPATSGSETPGSEPATSGSE | | | | |
| | TPGSPAGSPTSTEEGTSESATPESGP | | | | |
| | GTSTEPSEGSAPGTSTEPSEGSAPGS | | | | |
| | PAGSPTSTEEGTSTEPSEGSAPGTST | | | | |
| | EPSEGSAPGTSESATPESGPGTSTEP | | | | |
| | SEGSAPGTSESATPESGPGSEPATSG | | | | |
| | SETPGTSTEPSEGSAPGTSTEPSEGS | | | | |
| | APGTSESATPESGPGTSESATPESGP | | | | |
| | GSPAGSPTSTEEGTSESATPESGPGS | | | | |
| | EPATSGSETPGTSESATPESGPGTST | | | | |
| | EPSEGSAPGTSTEPSEGSAPGTSTEP | | | | |
| | SEGSAPGTSTEPSEGSAPGTSTEPSE | | | | |
| | GSAPGTSTEPSEGSAPGSPAGSPTST | | | | |
| | EEGTSTEPSEGSAPGTSESATPESGP | | | | |
| | GSEPATSGSETPGTSESATPESGPGS | | | | |
| | EPATSGSETPGTSESATPESGPGTST | | | | |
| | EPSEGSAPGTSESATPESGPGSPAGS | | | | |
| | PTSTEEGSPAGSPTSTEEGSPAGSPT | | | | |
| | STEEGTSESATPESGPGTSTEPSEGS | | | | |
| | APGTSESATPESGPGSEPATSGSETP | | | | |
| | GTSESATPESGPGSEPATSGSETPGT | | | | |
| | SESATPESGPGTSTEPSEGSAPGSPA | | | | |
| | GSPTSTEEGTSESATPESGPGSEPAT | | | | |
| | SGSETPGTSESATPESGPGSPAGSPT | | | | |
| | STEEGSPAGSPTSTEEGTSTEPSEGS | | | | |
| | APGTSESATPESGPGTSESATPESGP | | | | |
| | GTSESATPESGPGSEPATSGSETPGS | | | | |
| | EPATSGSETPGSPAGSPTSTEEGTST | | | | |
| | EPSEGSAPGTSTEPSEGSAPGSEPAT | | | | |
| | SGSETPGTSESATPESGPGTSTEPSE | | | | |
| | GSAP | | | | |
| BC 864 | GTSTEPSEPGSAGTSTEPSEPGSAGS | 700 | | Residue totals: H: 0 E:0 | 99.77% |
| | EPATSGTEPSGSGASEPTSTEPGSEP | | | percent: H: 0 E: 0 | |
| | ATSGTEPSGSEPATSGTEPSGSEPAT | | | | |
| | SGTEPSGSGASEPTSTEPGTSTEPSEP | | | | |
| | GSAGSEPATSGTEPSGTSTEPSEPGS | | | | |
| | AGSEPATSGTEPSGSEPATSGTEPSG | | | | |
| | TSTEPSEPGSAGTSTEPSEPGSAGSE | | | | |
| | PATSGTEPSGSEPATSGTEPSGTSEP | | | | |
| | STSEPGAGSGASEPTSTEPGTSEPST | | | | |
| | SEPGAGSEPATSGTEPSGSEPATSGT | | | | |
| | EPSGTSTEPSEPGSAGTSTEPSEPGS | | | | |
| | AGSGASEPTSTEPGSEPATSGTEPSG | | | | |
| | SEPATSGTEPSGSEPATSGTEPSGSE | | | | |
| | PATSGTEPSGTSTEPSEPGSAGSEPA | | | | |
| | TSGTEPSGSGASEPTSTEPGTSTEPSE | | | | |
| | PGSAGSEPATSGTEPSGSGASEPTST | | | | |
| | EPGTSTEPSEPGSAGSGASEPTSTEP | | | | |
| | GSEPATSGTEPSGSGASEPTSTEPGS | | | | |
| | EPATSGTEPSGSGASEPTSTEPGTST | | | | |
| | EPSEPGSAGSEPATSGTEPSGSGASE | | | | |
| | PTSTEPGTSTEPSEPGSAGSEPATSG | | | | |
| | TEPSGTSTEPSEPGSAGSEPATSGTE | | | | |
| | PSGTSTEPSEPGSAGTSTEPSEPGSA | | | | |
| | GTSTEPSEPGSAGTSTEPSEPGSAGT | | | | |
| | STEPSEPGSAGTSTEPSEPGSAGTSE | | | | |
| | PSTSEPGAGSGASEPTSTEPGTSTEP | | | | |
| | SEPGSAGTSTEPSEPGSAGTSTEPSE | | | | |
| | PGSAGSEPATSGTEPSGSGASEPTST | | | | |
| | EPGSEPATSGTEPSGSEPATSGTEPS | | | | |
| | GSEPATSGTEPSGSEPATSGTEPSGT | | | | |
| | SEPSTSEPGAGSEPATSGTEPSGSGA | | | | |
| | SEPTSTEPGTSTEPSEPGSAGSEPATS | | | | |
| | GTEPSGSGASEPTSTEPGTSTEPSEP | | | | |
| | GSA | | | | |

* H: alpha-helix E: beta-sheet

### Example 28

[0410] In this Example, different polypeptides, including several XTEN sequences, were assessed for repetitiveness in the amino acid sequence. Polypeptide amino acid sequences can be assessed for repetitiveness by quantifying the number of times a shorter subsequence appears within the overall polypeptide. For example, a polypeptide of 200 amino acid residues length has a total of 165 overlapping 36-amino acid “blocks” (or “36-mers”) and 198 3-mer “subsequences”, but the number of unique 3-mer subsequences will depend on the amount of repetitiveness within the sequence. For the analyses, different polypeptide sequences were assessed for repetitiveness by determining the subsequence score obtained by application of the following equation:

$$Subsequence score = \frac{{\sum }_{i = 1}^{n} ( \frac{{Count}_{i}}{m} )}{n}$$

[0411] where: n=(amino acid length of polypeptide)−(amino acid length of block)+1;
   [0412] m=(amino acid length of block)−(amino acid length of subsequence)+1; and
   [0413] Countᵢ=cumulative number of occurrences of each unique subsequence within blockᵢ
      In the analyses of the present Example, the subsequence score for the polypeptides of Table 26 were determined using the foregoing equation in a computer program wherein the block length was set at 36 amino acids and the subsequence length was set at 3 amino acids. The resulting subsequence score is a reflection of the degree of repetitiveness within the polypeptide.

[0414] The results, shown in Table 26, indicate that the polypeptides consisting of 2 or 3 amino acid types have high subsequence scores and, hence, a high degree of repetitiveness, while XTEN designed with only four types of 12 amino acids motifs (e.g., motifs from a family of Table 3), each consisting of four to six amino acids (i.e., G, S, T, E, P, and A) in a non-repetitive sequence, have subsequence scores of less than 3 and, in many cases, less than 2, reflecting a low degree of repetitiveness across the entire sequence. For example, the L288 sequence has two amino acid types and has short, highly repetitive block sequences, resulting in a subsequence score of 8.5. The polypeptide J288 has three amino acid types but also has short, repetitive block sequences, resulting in a subsequence score of 5.7. Y576 also has three amino acid types, but is not made of internal repeats, reflected in the subsequence score of 4.7. W576 consists of four types of amino acids, but has a higher degree of internal repetitiveness with the blocks, e.g., “GGSG” (SEQ ID NO: 701), resulting in a subsequence score of 4.3. The XTEN AD576 consists of four types of 12 amino acid motifs, each consisting of four types of amino acids. Because of the low degree of internal repetitiveness of the individual motifs, the overall subsequence score amino acids is 2.5. In contrast, the XTEN's consisting of four motifs containing six types of amino acids, each with a low degree of internal repetitiveness, have subsequence scores less than 2. For the XTEN sequences AE864 and AG864, the output of the program was graphed to show the variation in repetitiveness over the length of the sequence. FIG. 27, for AE864 and FIG. 28 for Ag864, show the output, in which the individual subsequence score for the sequential 36-mer blocks are plotted as individual points corresponding to the start of each block as the amino acid number in the sequence in the X axis versus the subsequence scores for the corresponding blocks in the Y-axis. Examination of the graph for AE864 shows that the sequence, which has an overall subsequence score of 1.7, varies between scores of 1 and 2 for much of the sequence, but has areas of higher repetitiveness starting around amino acid 330, 505, and 725. Conversely, there are approximately 10 blocks where the subsequence score approaches 1, a score that represents a complete lack of repetitiveness. Similarly, examination of the graph for AG864 shows that the sequence, which has an overall subsequence score of 1.9, varies between scores of 1.2 and 2 for much of the sequence, but has four areas of higher repetitiveness where the subsequence scores are above 3.

[0415] Conclusions: The results indicate that the combination of 12 amino acid subsequence motifs, each consisting of four to six amino acid types that are essentially non-repetitive, into a longer XTEN polypeptide results in an overall sequence that is substantially non-repetitive, as indicated by overall subsequence scores less than 3 and, in many cases, less than 2. This is despite the fact that each subsequence motif may be used multiple times across the sequence. In contrast, polymers created from smaller numbers of amino acid types resulted in higher subsequence scores, with polypeptides consisting of two amino acid type having higher scores that those consisting of three amino acid types.

TABLE 26
Subsequence score calculations of polypeptide sequences

| | | SEQ | |
|---|---|---|---|
| | | ID | |
| Seq Name | Amino Acid Sequence | NO: | Score |
| US | NNTNNTNNTNNTNNTNNTNNTNNTNNTNNTNNTNNTNNTNNTNNTNNTN | 702 | 11.4 |
| 20090298762 | NTNNTNNTNNTNNTNNTNNTNNTNNTNNTNNTNNTNNTNNTNNTNNTNN | | |
| SEQ ID NO: 1 | TNNTNNTNNTNNTNNTNNTNNTNNTNNTNNTNNTNNTNNTNNTNNTNNT | | |
| | NNTNNTNNTNNTNNTNNTNNTNNTNNTNNTNNTNNTNNTNNTNNTNNT | | |
| H288 | GSGGEGGSGGSGGSGGEGGSGGSGGSGGEGGSGGSGGSGGEGGSGGSGGS | 703 | 7.1 |
| | GGEGGSGGSGGSGGEGGSGGSGGSGGEGGSGGSGGSGGEGGSGGSGGSGG | | |
| | EGGSGGSGGSGGEGGSGGSGGSGGEGGSGGSGGSGGEGGSGGSGGSGGEG | | |
| | GSGGSGGSGGEGGSGGSGGSGGEGGSGGSGGSGGEGGSGGSGGSGGEGGS | | |
| | GGSGGSGGEGGSGGSGGSGGEGGSGGSGGSGGEGGSGGSGGSGGEGGSGG | | |
| | SGGSGGEGGSGGSGGSGGEGGSGGSGGSGGEGGSGGSG | | |
| J288 | GSGGEGGSGGEGGSGGEGGSGGEGGSGGEGGSGGEGGSGGEGGSGGEGGS | 704 | 5.7 |
| | GGEGGSGGEGGSGGEGGSGGEGGSGGEGGSGGEGGSGGEGGSGGEGGSGG | | |
| | EGGSGGEGGSGGEGGSGGEGGSGGEGGSGGEGGSGGEGGSGGEGGSGGEG | | |
| | GSGGEGGSGGEGGSGGEGGSGGEGGSGGEGGSGGEGGSGGEGGSGGEGGS | | |
| | GGEGGSGGEGGSGGEGGSGGEGGSGGEGGSGGEGGSGGEGGSGGEGGSGG | | |
| | EGGSGGEGGSGGEGGSGGEGGSGGEGGSGGEGGSGGEG | | |
| K288 | GEGEGGGEGGEGEGGGEGGEGEGGGEGGEGEGGGEGGEGEGGGEGGEGE | 705 | 8.0 |
| | GGGEGGEGEGGGEGGEGEGGGEGGEGEGGGEGGEGEGGGEGGEGEGGGE | | |
| | GGEGEGGGEGGEGEGGGEGGEGEGGGEGGEGEGGGEGGEGEGGGEGGEG | | |
| | EGGGEGGEGEGGGEGGEGEGGGEGGEGEGGGEGGEGEGGGEGGEGEGGG | | |
| | EGGEGEGGGEGGEGEGGGEGGEGEGGGEGGEGEGGGEGGEGEGGGEGGE | | |
| | GEGGGEGGEGEGGGEGGEGEGGGEGGEGEGGGEGGEGEGGGEG | | |
| L288 | SSESSESSSSESSSESSESSSSESSSESSESSSSESSSESSESSSSESSSESSESSSSE | 706 | 8.5 |
| | SSSESSESSSSESSSESSESSSSESSSESSESSSSESSSESSESSSSESSSESSESSSS | | |
| | ESSSESSESSSSESSSESSESSSSESSSESSESSSSESSSESSESSSSESSSESSESSS | | |
| | SESSSESSESSSSESSSESSESSSSESSSESSESSSSESSSESSESSSSESSSESSESS | | |
| | SSESSSESSESSSSESSSESSESSSSESSSESSESSSSESSSESSESSSSES | | |
| Y288 | GEGSGEGSEGEGSEGSGEGEGSEGSGEGEGGSEGSEGEGGSEGSEGEGGSEG | 707 | 4.7 |
| | SEGEGSGEGSEGEGGSEGSEGEGSGEGSEGEGSEGGSEGEGGSEGSEGEGSG | | |
| | EGSEGEGGEGGSEGEGSEGSGEGEGSGEGSEGEGSEGSGEGEGSGEGSEGEG | | |
| | SEGSGEGEGSEGSGEGEGGSEGSEGEGSEGSGEGEGGEGSGEGEGSGEGSEG | | |
| | EGGGEGSEGEGSGEGGEGEGSEGGSEGEGGSEGGEGEGSEGSGEGEGSEGG | | |
| | SEGEGSEGGSEGEGSEGSGEGEGSEGSGE | | |
| Q576 | GGKPGEGGKPEGGGGKPGGKPEGEGEGKPGGKPEGGGKPGGGEGGKPEGG | 708 | 3.4 |
| | KPEGEGKPGGGEGKPGGKPEGGGGKPEGEGKPGGGGGKPGGKPEGEGKPG | | |
| | GGEGGKPEGKPGEGGEGKPGGKPEGGGEGKPGGGKPGEGGKPGEGKPGGG | | |
| | EGGKPEGGKPEGEGKPGGGEGKPGGKPGEGGKPEGGGEGKPGGKPGEGGE | | |
| | GKPGGGKPEGEGKPGGGKPGGGEGGKPEGEGKPGGKPEGGGEGKPGGKPE | | |
| | GGGKPEGGGEGKPGGGKPGEGGKPGEGEGKPGGKPEGEGKPGGEGGGKPE | | |
| | GKPGGGEGGKPEGGKPGEGGKPEGGKPGEGGEGKPGGGKPGEGGKPEGGG | | |
| | KPEGEGKPGGGGKPGEGGKPEGGKPEGGGEGKPGGGKPEGEGKPGGGEGK | | |
| | PGGKPEGGGGKPGEGGKPEGGKPGGEGGGKPEGEGKPGGKPGEGGGGKPG | | |
| | GKPEGEGKPGEGGEGKPGGKPEGGGEGKPGGKPEGGGEGKPGGGKPGEGG | | |
| | KPEGGGKPGEGGKPGEGGKPEGEGKPGGGEGKPGGKPGEGGKPEGGGEGK | | |
| | PGGKPGGEGGGKPEGGKPGEGGKPEG | | |
| U576 | GEGKPGGKPGSGGGKPGEGGKPGSGEGKPGGKPGSGGSGKPGGKPGEGGK | 709 | 3.4 |
| | PEGGSGGKPGGGGKPGGKPGGEGSGKPGGKPEGGGKPEGGSGGKPGGKPE | | |
| | GGSGGKPGGKPGSGEGGKPGGGKPGGEGKPGSGKPGGEGSGKPGGKPEGG | | |
| | SGGKPGGKPEGGSGGKPGGSGKPGGKPGEGGKPEGGSGGKPGGSGKPGGK | | |
| | PEGGGSGKPGGKPGEGGKPGSGEGGKPGGGKPGGEGKPGSGKPGGEGSGK | | |
| | PGGKPGSGGEGKPGGKPEGGSGGKPGGGKPGGEGKPGSGGKPGEGGKPGS | | |
| | GGGKPGGKPGGEGEGKPGGKPGEGGKPGGEGSGKPGGGGKPGGKPGGEGG | | |
| | KPEGSGKPGGGSGKPGGKPEGGGGKPEGSGKPGGGGKPEGSGKPGGGKPE | | |
| | GGSGGKPGGSGKPGGKPGEGGGKPEGSGKPGGGSGKPGGKPEGGGKPEGG | | |
| | SGGKPGGKPEGGSGGKPGGKPGGEGSGKPGGKPGSGEGGKPGGKPGEGSG | | |
| | GKPGGKPEGGSGGKPGGSGKPGGKPEGGGSGKPGGKPGEGGKPGGEGSGK | | |
| | PGGSGKPG | | |
| W576 | GGSGKPGKPGGSGSGKPGSGKPGGGSGKPGSGKPGGGSGKPGSGKPGGGSG | 710 | 4.3 |
| | KPGSGKPGGGGKPGSGSGKPGGGKPGGSGGKPGGGSGKPGKPGSGGSGKP | | |
| | GSGKPGGGSGGKPGKPGSGGSGGKPGKPGSGGGSGKPGKPGSGGSGGKPG | | |
| | KPGSGGSGGKPGKPGSGGSGKPGSGKPGGGSGKPGSGKPGSGGSGKPGKPG | | |
| | SGGSGKPGSGKPGSGSGKPGSGKPGGGSGKPGSGKPGSGGSGKPGKPGSGG | | |
| | GKPGSGSGKPGGGKPGSGSGKPGGGKPGGSGGKPGGSGGKPGKPGSGGGS | | |
| | GKPGKPGSGGGSGKPGKPGGSGSGKPGSGKPGGGSGKPGSGKPGSGGSGKP | | |
| | GKPGSGGSGGKPGKPGSGGGKPGSGSGKPGGGKPGSGSGKPGGGKPGSGSG | | |
| | KPGGGKPGSGSGKPGGSGKPGSGKPGGGSGGKPGKPGSGGSGKPGSGKPGS | | |
| | GGSGKPGKPGGSGSGKPGSGKPGGGSGKPGSGKPGGGSGKPGSGKPGGGSG | | |
| | KPGSGKPGGGGKPGSGSGKPGGSGGKPGKPGSGGSGGKPGKPGSGGSGKPG | | |
| | SGKPGGGSGGKPGKPGSGG | | |
| Y576 | GEGSGEGSEGEGSEGSGEGEGSEGSGEGEGGSEGSEGEGSEGSGEGEGGEGS | 711 | 4.7 |
| | GEGEGSGEGSEGEGGGEGSEGEGSGEGGEGEGSEGGSEGEGGSEGGEGEGS | | |
| | EGSGEGEGSEGGSEGEGSEGGSEGEGSEGSGEGEGSEGSGEGEGSEGSGEGE | | |
| | GSEGSGEGEGSEGGSEGEGGSEGSEGEGSGEGSEGEGGSEGSEGEGGGEGSE | | |
| | GEGSGEGSEGEGGSEGSEGEGGSEGSEGEGGEGSGEGEGSEGSGEGEGSGEG | | |
| | SEGEGSEGSGEGEGSEGSGEGEGGSEGSEGEGSGEGSEGEGSEGSGEGEGSE | | |
| | GSGEGEGGSEGSEGEGGSEGSEGEGGSEGSEGEGGEGSGEGEGSEGSGEGEG | | |
| | SGEGSEGEGSEGSGEGEGSEGSGEGEGGSEGSEGEGSEGSGEGEGGEGSGEG | | |
| | EGSGEGSEGEGGGEGSEGEGSEGSGEGEGSEGSGEGEGSEGGSEGEGGSEGS | | |
| | EGEGSEGGSEGEGSEGGSEGEGSEGSGEGEGSEGSGEGEGSGEGSEGEGGSE | | |
| | GGEGEGSEGGSEGEGSEGGSEGEGGEGSGEGEGGGEGSEGEGSEGSGEGEG | | |
| | SGEGSE | | |
| AE42_1 | TEPSEGSAPGSPAGSPTSTEEGTSESATPESGPGSEPATSGS | 712 | 1.2 |
| AE42_2 | PAGSPTSTEEGTSTEPSEGSAPGTSESATPESGPGSEPATSG | 713 | 1.2 |
| AE42_3 | SEPATSGSETPGTSESATPESGPGTSTEPSEGSAPGSPAGSP | 714 | 1.1 |
| AG42_1 | GAPSPSASTGTGPGTPGSGTASSSPGSSTPSGATGSPGPSGP | 715 | 1.1 |
| AG42_2 | GPGTPGSGTASSSPGSSTPSGATGSPGSSPSASTGTGPGASP | 716 | 1.3 |
| AG42_3 | SPSASTGTGPGASPGTSSTGSPGTPGSGTASSSPGSSTPSGA | 717 | 1.4 |
| AG42_4 | SASTGTGPGASPGTSSTGSPGTPGSGTASSSPGSSTPSGATG | 718 | 1.4 |
| AE48 | MAEPAGSPTSTEEGTPGSGTASSSPGSSTPSGATGSPGASPGTSSTGS | 719 | 1.2 |
| AM48 | MAEPAGSPTSTEEGASPGTSSTGSPGSSTPSGATGSPGSSTPSGATGS | 720 | 1.7 |
| AE144 | GSEPATSGSETPGTSESATPESGPGSEPATSGSETPGSPAGSPTSTEEGTSTEPS | 721 | 1.6 |
| | EGSAPGSEPATSGSETPGSEPATSGSETPGSEPATSGSETPGTSTEPSEGSAPGT | | |
| | SESATPESGPGSEPATSGSETPGTSTEPSEGSAP | | |
| AF144 | GTSTPESGSASPGTSPSGESSTAPGTSPSGESSTAPGSTSSTAESPGPGSTSESPS | 722 | 1.7 |
| | GTAPGSTSSTAESPGPGTSPSGESSTAPGTSTPESGSASPGSTSSTAESPGPGTS | | |
| | PSGESSTAPGTSPSGESSTAPGTSPSGESSTAP | | |
| AG144_1 | PGSSPSASTGTGPGSSPSASTGTGPGTPGSGTASSSPGSSTPSGATGSPGSSPSA | 723 | 1.6 |
| | STGTGPGASPGTSSTGSPGTPGSGTASSSPGSSTPSGATGSPGTPGSGTASSSP | | |
| | GASPGTSSTGSPGASPGTSSTGSPGTPGSGTASSS | | |
| AG144_2 | SGTASSSPGSSTPSGATGSPGTPGSGTASSSPGSSTPSGATGSPGSSTPSGATGS | 724 | 1.7 |
| | PGSSPSASTGTGPGSSPSASTGTGPGASPGTSSTGSPGTPGSGTASSSPGSSTPS | | |
| | GATGSPGSSPSASTGTGPGSSPSASTGTGPGASP | | |
| AG144_3 | GTPGSGTASSSPGSSTPSGATGSPGSSTPSGATGSPGSSPSASTGTGPGSSPSAS | 725 | 1.7 |
| | TGTGPGASPGTSSTGSPGTPGSGTASSSPGSSTPSGATGSPGSSPSASTGTGPG | | |
| | SSPSASTGTGPGASPGTSSTGSPGASPGTSSTGSP | | |
| AG144_4 | GTPGSGTASSSPGSSTPSGATGSPGSSPSASTGTGPGSSPSASTGTGPGASPGT | 726 | 1.7 |
| | SSTGSPGASPGTSSTGSPGSSTPSGATGSPGSSPSASTGTGPGASPGTSSTGSPG | | |
| | SSPSASTGTGPGTPGSGTASSSPGSSTPSGATGSP | | |
| AE288 | GTSESATPESGPGSEPATSGSETPGTSESATPESGPGSEPATSGSETPGTSESAT | 727 | 1.6 |
| | PESGPGTSTEPSEGSAPGSPAGSPTSTEEGTSESATPESGPGSEPATSGSETPGT | | |
| | SESATPESGPGSPAGSPTSTEEGSPAGSPTSTEEGTSTEPSEGSAPGTSESATPE | | |
| | SGPGTSESATPESGPGTSESATPESGPGSEPATSGSETPGSEPATSGSETPGSPA | | |
| | GSPTSTEEGTSTEPSEGSAPGTSTEPSEGSAPGSEPATSGSETPGTSESATPESG | | |
| | PGTSTEPSEGSAP | | |
| AG288_1 | PGASPGTSSTGSPGASPGTSSTGSPGTPGSGTASSSPGSSTPSGATGSPGTPGS | 728 | 1.8 |
| | GTASSSPGSSTPSGATGSPGTPGSGTASSSPGS STPSGATGSPGSSTPSGATGSP | | |
| | GSSPSASTGTGPGSSPSASTGTGPGASPGTSSTGSPGTPGSGTASSSPGSSTPSG | | |
| | ATGSPGSSPSASTGTGPGSSPSASTGTGPGASPGTSSTGSPGASPGTSSTGSPG | | |
| | SSTPSGATGSPGSSPSASTGTGPGASPGTSSTGSPGSSPSASTGTGPGTPGSGT | | |
| | ASSSPGSSTPSGATGS | | |
| AG288_2 | GSSPSASTGTGPGSSPSASTGTGPGTPGSGTASSSPGSSTPSGATGSPGSSPSAS | 729 | 1.8 |
| | TGTGPGASPGTSSTGSPGTPGSGTASSSPGSSTPSGATGSPGTPGSGTASSSPG | | |
| | ASPGTSSTGSPGASPGTSSTGSPGTPGSGTASSSPGSSTPSGATGSPGASPGTSS | | |
| | TGSPGTPGSGTASSSPGSSTPSGATGSPGSSPSASTGTGPGSSPSASTGTGPGSS | | |
| | TPSGATGSPGSSTPSGATGSPGASPGTSSTGSPGASPGTSSTGSPGASPGTSST | | |
| | GSPGTPGSGTASSSP | | |
| AD576 | GSSESGSSEGGPGSGGEPSESGSSGSSESGSSEGGPGSSESGSSEGGPGSSESGS | 730 | 2.5 |
| | SEGGPGSSESGSSEGGPGSSESGSSEGGPGESPGGSSGSESGSEGSSGPGESSG | | |
| | SSESGSSEGGPGSSESGSSEGGPGSSESGSSEGGPGSGGEPSESGSSGESPGGSS | | |
| | GSESGESPGGSSGSESGSGGEPSESGSSGSSESGSSEGGPGSGGEPSESGSSGS | | |
| | GGEPSESGSSGSEGSSGPGESSGESPGGSSGSESGSGGEPSESGSSGSGGEPSE | | |
| | SGSSGSGGEPSESGSSGSSESGSSEGGPGESPGGSSGSESGESPGGSSGSESGES | | |
| | PGGSSGSESGESPGGSSGSESGESPGGSSGSESGSSESGSSEGGPGSGGEPSES | | |
| | GSSGSEGSSGPGESSGSSESGSSEGGPGSGGEPSESGSSGSSESGSSEGGPGSG | | |
| | GEPSESGSSGESPGGSSGSESGESPGGSSGSESGSSESGSSEGGPGSGGEPSES | | |
| | GSSGSSESGSSEGGPGSGGEPSESGSSGSGGEPSESGSSGESPGGSSGSESGSE | | |
| | GSSGPGESSGSSESGSSEGGPGSEGSSGPGESS | | |
| AE576 | AGSPAGSPTSTEEGTSESATPESGPGTSTEPSEGSAPGSPAGSPTSTEEGTSTEP | 731 | 1.7 |
| | SEGSAPGTSTEPSEGSAPGTSESATPESGPGSEPATSGSETPGSEPATSGSETPG | | |
| | SPAGSPTSTEEGTSESATPESGPGTSTEPSEGSAPGTSTEPSEGSAPGSPAGSPT | | |
| | STEEGTSTEPSEGSAPGTSTEPSEGSAPGTSESATPESGPGTSTEPSEGSAPGTS | | |
| | ESATPESGPGSEPATSGSETPGTSTEPSEGSAPGTSTEPSEGSAPGTSESATPES | | |
| | GPGTSESATPESGPGSPAGSPTSTEEGTSESATPESGPGSEPATSGSETPGTSES | | |
| | ATPESGPGTSTEPSEGSAPGTSTEPSEGSAPGTSTEPSEGSAPGTSTEPSEGSAP | | |
| | GTSTEPSEGSAPGTSTEPSEGSAPGSPAGSPTSTEEGTSTEPSEGSAPGTSESAT | | |
| | PESGPGSEPATSGSETPGTSESATPESGPGSEPATSGSETPGTSESATPESGPGT | | |
| | STEPSEGSAPGTSESATPESGPGSPAGSPTSTEEGSPAGSPTSTEEGSPAGSPTS | | |
| | TEEGTSESATPESGPGTSTEPSEGSAP | | |
| AF540 | GSTSSTAESPGPGSTSSTAESPGPGSTSESPSGTAPGSTSSTAESPGPGSTSSTA | 732 | 1.8 |
| | ESPGPGTSTPESGSASPGSTSESPSGTAPGTSPSGESSTAPGSTSESPSGTAPGS | | |
| | TSESPSGTAPGTSPSGESSTAPGSTSESPSGTAPGSTSESPSGTAPGTSPSGESS | | |
| | TAPGSTSESPSGTAPGSTSESPSGTAPGSTSESPSGTAPGTSTPESGSASPGSTS | | |
| | ESPSGTAPGTSTPESGSASPGSTSSTAESPGPGSTSSTAESPGPGTSTPESGSAS | | |
| | PGTSTPESGSASPGSTSESPSGTAPGTSTPESGSASPGTSTPESGSASPGSTSESP | | |
| | SGTAPGSTSESPSGTAPGSTSESPSGTAPGSTSSTAESPGPGTSTPESGSASPGT | | |
| | STPESGSASPGSTSESPSGTAPGSTSESPSGTAPGTSTPESGSASPGSTSESPSGT | | |
| | APGSTSESPSGTAPGTSTPESGSASPGTSPSGESSTAPGSTSSTAESPGPGTSPS | | |
| | GESSTAPGSTSSTAESPGPGTSTPESGSASPGSTSESPSGTAP | | |
| AF504 | GASPGTSSTGSPGSSPSASTGTGPGSSPSASTGTGPGTPGSGTASSSPGSSTPSG | 733 | 1.9 |
| | ATGSPGSNPSASTGTGPGASPGTSSTGSPGTPGSGTASSSPGSSTPSGATGSPG | | |
| | TPGSGTASSSPGASPGTSSTGSPGASPGTSSTGSPGTPGSGTASSSPGSSTPSGA | | |
| | TGSPGASPGTSSTGSPGTPGSGTASSSPGSSTPSGATGSPGSNPSASTGTGPGS | | |
| | SPSASTGTGPGSSTPSGATGSPGSSTPSGATGSPGASPGTSSTGSPGASPGTSS | | |
| | TGSPGASPGTSSTGSPGTPGSGTASSSPGASPGTSSTGSPGASPGTSSTGSPGA | | |
| | SPGTSSTGSPGSSPSASTGTGPGTPGSGTASSSPGASPGTSSTGSPGASPGTSST | | |
| | GSPGASPGTSSTGSPGSSTPSGATGSPGSSTPSGATGSPGASPGTSSTGSPGTP | | |
| | GSGTASSSPGSSTPSGATGSPGSSTPSGATGSPGSSTPSGATGSPGSSPSASTGT | | |
| | GPGASPGTSSTGSP | | |
| AG576 | PGTPGSGTASSSPGSSTPSGATGSPGSSPSASTGTGPGSSPSASTGTGPGSSTPS | 734 | 2.1 |
| | GATGSPGSSTPSGATGSPGASPGTSSTGSPGASPGTSSTGSPGASPGTSSTGSP | | |
| | GTPGSGTASSSPGASPGTSSTGSPGASPGTSSTGSPGASPGTSSTGSPGSSPSAS | | |
| | TGTGPGTPGSGTASSSPGASPGTSSTGSPGASPGTSSTGSPGASPGTSSTGSPG | | |
| | SSTPSGATGSPGSSTPSGATGSPGASPGTSSTGSPGTPGSGTASSSPGSSTPSGA | | |
| | TGSPGSSTPSGATGSPGSSTPSGATGSPGSSPSASTGTGPGASPGTSSTGSPGA | | |
| | SPGTSSTGSPGTPGSGTASSSPGASPGTSSTGSPGASPGTSSTGSPGASPGTSST | | |
| | GSPGASPGTSSTGSPGTPGSGTASSSPGSSTPSGATGSPGTPGSGTASS SPGSST | | |
| | PSGATGSPGTPGSGTASSSPGSSTPSGATGSPGSSTPSGATGSPGSSPSASTGT | | |
| | GPGSSPSASTGTGPGASPGTSSTGSPGTPGSGTASSSPGSSTPSGATGSPGSSPS | | |
| | ASTGTGPGSSPSASTGTGPGASPGTSSTGS | | |
| AD836 | GSSESGSSEGGPGSSESGSSEGGPGESPGGSSGSESGSGGEPSESGSSGESPGG | 735 | 2.5 |
| | SSGSESGESPGGSSGSESGSSESGSSEGGPGSSESGSSEGGPGSSESGSSEGGPG | | |
| | ESPGGSSGSESGESPGGSSGSESGESPGGSSGSESGSSESGSSEGGPGSSESGSS | | |
| | EGGPGSSESGSSEGGPGSSESGSSEGGPGSSESGSSEGGPGSSESGSSEGGPGS | | |
| | GGEPSESGSSGESPGGSSGSESGESPGGSSGSESGSGGEPSESGSSGSEGSSGP | | |
| | GESSGSSESGSSEGGPGSGGEPSESGSSGSEGSSGPGESSGSSESGSSEGGPGS | | |
| | GGEPSESGSSGESPGGSSGSESGSGGEPSESGSSGSGGEPSESGSSGSSESGSSE | | |
| | GGPGSGGEPSESGSSGSGGEPSESGSSGSEGSSGPGESSGESPGGSSGSESGSE | | |
| | GSSGPGESSGSEGSSGPGESSGSGGEPSESGSSGSSESGSSEGGPGSSESGSSEG | | |
| | GPGESPGGSSGSESGSGGEPSESGSSGSEGSSGPGESSGESPGGSSGSESGSEG | | |
| | SSGPGSSESGSSEGGPGSGGEPSESGSSGSEGSSGPGESSGSEGSSGPGESSGSE | | |
| | GSSGPGESSGSGGEPSESGSSGSGGEPSESGSSGESPGGSSGSESGESPGGSSG | | |
| | SESGSGGEPSESGSSGSEGSSGPGESSGESPGGSSGSESGSSESGSSEGGPGSSE | | |
| | SGSSEGGPGSSESGSSEGGPGSGGEPSESGSSGSSESGSSEGGPGESPGGSSGS | | |
| | ESGSGGEPSESGSSGSSESGSSEGGPGESPGGSSGSESGSGGEPSESGSSGESP | | |
| | GGSSGSESGSGGEPSESGSS | | |
| AE864 | GSPAGSPTSTEEGTSESATPESGPGTSTEPSEGSAPGSPAGSPTSTEEGTSTEPS | 736 | 1.7 |
| | EGSAPGTSTEPSEGSAPGTSESATPESGPGSEPATSGSETPGSEPATSGSETPGS | | |
| | PAGSPTSTEEGTSESATPESGPGTSTEPSEGSAPGTSTEPSEGSAPGSPAGSPTS | | |
| | TEEGTSTEPSEGSAPGTSTEPSEGSAPGTSESATPESGPGTSTEPSEGSAPGTSE | | |
| | SATPESGPGSEPATSGSETPGTSTEPSEGSAPGTSTEPSEGSAPGTSESATPESG | | |
| | PGTSESATPESGPGSPAGSPTSTEEGTSESATPESGPGSEPATSGSETPGTSESA | | |
| | TPESGPGTSTEPSEGSAPGTSTEPSEGSAPGTSTEPSEGSAPGTSTEPSEGSAPG | | |
| | TSTEPSEGSAPGTSTEPSEGSAPGSPAGSPTSTEEGTSTEPSEGSAPGTSESATP | | |
| | ESGPGSEPATSGSETPGTSESATPESGPGSEPATSGSETPGTSESATPESGPGTS | | |
| | TEPSEGSAPGTSESATPESGPGSPAGSPTSTEEGSPAGSPTSTEEGSPAGSPTST | | |
| | EEGTSESATPESGPGTSTEPSEGSAPGTSESATPESGPGSEPATSGSETPGTSES | | |
| | ATPESGPGSEPATSGSETPGTSESATPESGPGTSTEPSEGSAPGSPAGSPTSTEE | | |
| | GTSESATPESGPGSEPATSGSETPGTSESATPESGPGSPAGSPTSTEEGSPAGSP | | |
| | TSTEEGTSTEPSEGSAPGTSESATPESGPGTSESATPESGPGTSESATPESGPGS | | |
| | EPATSGSETPGSEPATSGSETPGSPAGSPTSTEEGTSTEPSEGSAP | | |
| AF864 | GSTSESPSGTAPGTSPSGESSTAPGSTSESPSGTAPGSTSESPSGTAPGTSTPES | 737 | 1.8 |
| | GSASPGTSTPESGSASPGSTSESPSGTAPGSTSESPSGTAPGTSPSGESSTAPGS | | |
| | TSESPSGTAPGTSPSGESSTAPGTSPSGESSTAPGSTSSTAESPGPGTSPSGESS | | |
| | TAPGTSPSGESSTAPGSTSSTAESPGPGTSTPESGSASPGTSTPESGSASPGSTS | | |
| | ESPSGTAPGSTSESPSGTAPGTSTPESGSASPGSTSSTAESPGPGTSTPESGSAS | | |
| | PGSTSESPSGTAPGTSPSGESSTAPGSTSSTAESPGPGTSPSGESSTAPGTSTPE | | |
| | SGSASPGSTSSTAESPGPGSTSSTAESPGPGSTSSTAESPGPGSTSSTAESPGPG | | |
| | TSPSGESSTAPGSTSESPSGTAPGSTSESPSGTAPGTSTPESGPXXXGASASGA | | |
| | PSTXXXXSESPSGTAPGSTSESPSGTAPGSTSESPSGTAPGSTSESPSGTAPGST | | |
| | SESPSGTAPGSTSESPSGTAPGTSTPESGSASPGTSPSGESSTAPGTSPSGESST | | |
| | APGSTSSTAESPGPGTSPSGESSTAPGTSTPESGSASPGSTSESPSGTAPGSTSE | | |
| | SPSGTAPGTSPSGESSTAPGSTSESPSGTAPGTSTPESGSASPGTSTPESGSASP | | |
| | GSTSESPSGTAPGTSTPESGSASPGSTSSTAESPGPGSTSESPSGTAPGSTSESPS | | |
| | GTAPGTSPSGESSTAPGSTSSTAESPGPGTSPSGESSTAPGTSTPESGSASPGTS | | |
| | PSGESSTAPGTSPSGESSTAPGTSPSGESSTAPGSTSSTAESPGPGSTSSTAESP | | |
| | GPGTSPSGESSTAPGSSPSASTGTGPGSSTPSGATGSPGSSTPSGATGSP | | |
| AG864 | GASPGTSSTGSPGSSPSASTGTGPGSSPSASTGTGPGTPGSGTASSSPGSSTPSG | 738 | 1.9 |
| | ATGSPGSSPSASTGTGPGASPGTSSTGSPGTPGSGTASSSPGSSTPSGATGSPG | | |
| | TPGSGTASSSPGASPGTSSTGSPGASPGTSSTGSPGTPGSGTASSSPGSSTPSGA | | |
| | TGSPGASPGTSSTGSPGTPGSGTASSSPGSSTPSGATGSPGSSPSASTGTGPGSS | | |
| | PSASTGTGPGSSTPSGATGSPGSSTPSGATGSPGASPGTSSTGSPGASPGTSST | | |
| | GSPGASPGTSSTGSPGTPGSGTASSSPGASPGTSSTGSPGASPGTSSTGSPGAS | | |
| | PGTSSTGSPGSSPSASTGTGPGTPGSGTASSSPGASPGTSSTGSPGASPGTSST | | |
| | GSPGASPGTSSTGSPGSSTPSGATGSPGSSTPSGATGSPGASPGTSSTGSPGTP | | |
| | GSGTASSSPGSSTPSGATGSPGSSTPSGATGSPGSSTPSGATGSPGSSPSASTGT | | |
| | GPGASPGTSSTGSPGASPGTSSTGSPGTPGSGTASSSPGASPGTSSTGSPGASP | | |
| | GTSSTGSPGASPGTSSTGSPGASPGTSSTGSPGTPGSGTASSSPGSSTPSGATG | | |
| | SPGTPGSGTASSSPGSSTPSGATGSPGTPGSGTASSSPGSSTPSGATGSPGSSTP | | |
| | SGATGSPGSSPSASTGTGPGSSPSASTGTGPGASPGTSSTGSPGTPGSGTASSS | | |
| | PGSSTPSGATGSPGSSPSASTGTGPGSSPSASTGTGPGASPGTSSTGSPGASPG | | |
| | TSSTGSPGSSTPSGATGSPGSSPSASTGTGPGASPGTSSTGSPGSSPSASTGTGP | | |
| | GTPGSGTASSSPGSSTPSGATGSPGSSTPSGATGSPGASPGTSSTGSP | | |
| AM875 | GTSTEPSEGSAPGSEPATSGSETPGSPAGSPTSTEEGSTSSTAESPGPGTSTPES | 739 | 1.5 |
| | GSASPGSTSESPSGTAPGSTSESPSGTAPGTSTPESGSASPGTSTPESGSASPGS | | |
| | EPATSGSETPGTSESATPESGPGSPAGSPTSTEEGTSTEPSEGSAPGTSESATPE | | |
| | SGPGTSTEPSEGSAPGTSTEPSEGSAPGSPAGSPTSTEEGTSTEPSEGSAPGTST | | |
| | EPSEGSAPGTSESATPESGPGTSESATPESGPGTSTEPSEGSAPGTSTEPSEGSA | | |
| | PGTSESATPESGPGTSTEPSEGSAPGSEPATSGSETPGSPAGSPTSTEEGSSTPS | | |
| | GATGSPGTPGSGTASSSPGSSTPSGATGSPGTSTEPSEGSAPGTSTEPSEGSAP | | |
| | GSEPATSGSETPGSPAGSPTSTEEGSPAGSPTSTEEGTSTEPSEGSAPGASASG | | |
| | APSTGGTSESATPESGPGSPAGSPTSTEEGSPAGSPTSTEEGSTSSTAESPGPGS | | |
| | TSESPSGTAPGTSPSGESSTAPGTPGSGTASSSPGSSTPSGATGSPGSSPSASTG | | |
| | TGPGSEPATSGSETPGTSESATPESGPGSEPATSGSETPGSTSSTAESPGPGSTS | | |
| | STAESPGPGTSPSGESSTAPGSEPATSGSETPGSEPATSGSETPGTSTEPSEGSA | | |
| | PGSTSSTAESPGPGTSTPESGSASPGSTSESPSGTAPGTSTEPSEGSAPGTSTEP | | |
| | SEGSAPGTSTEPSEGSAPGSSTPSGATGSPGSSPSASTGTGPGASPGTSSTGSP | | |
| | GSEPATSGSETPGTSESATPESGPGSPAGSPTSTEEGSSTPSGATGSPGSSPSAS | | |
| | TGTGPGASPGTSSTGSPGTSESATPESGPGTSTEPSEGSAPGTSTEPSEGSAP | | |
| AM1296 | GTSTEPSEGSAPGSEPATSGSETPGSPAGSPTSTEEGSTSSTAESPGPGTSTPES | 740 | 1.6 |
| | GSASPGSTSESPSGTAPGSTSESPSGTAPGTSTPESGSASPGTSTPESGSASPGS | | |
| | EPATSGSETPGTSESATPESGPGSPAGSPTSTEEGTSTEPSEGSAPGTSESATPE | | |
| | SGPGTSTEPSEGSAPGTSTEPSEGSAPGSPAGSPTSTEEGTSTEPSEGSAPGTST | | |
| | EPSEGSAPGTSESATPESGPGTSESATPESGPGTSTEPSEGSAPGTSTEPSEGSA | | |
| | PGTSESATPESGPGTSTEPSEGSAPGSEPATSGSETPGSPAGSPTSTEEGSSTPS | | |
| | GATGSPGTPGSGTASSSPGSSTPSGATGSPGTSTEPSEGSAPGTSTEPSEGSAP | | |
| | GSEPATSGSETPGSPAGSPTSTEEGSPAGSPTSTEEGTSTEPSEGSAPGPEPTGP | | |
| | APSGGSEPATSGSETPGTSESATPESGPGSPAGSPTSTEEGTSESATPESGPGSP | | |
| | AGSPTSTEEGSPAGSPTSTEEGTSESATPESGPGSPAGSPTSTEEGSPAGSPTST | | |
| | EEGSTSSTAESPGPGSTSESPSGTAPGTSPSGESSTAPGSTSESPSGTAPGSTSE | | |
| | SPSGTAPGTSPSGESSTAPGTSTEPSEGSAPGTSESATPESGPGTSESATPESGP | | |
| | GSEPATSGSETPGTSESATPESGPGTSESATPESGPGTSTEPSEGSAPGTSESAT | | |
| | PESGPGTSTEPSEGSAPGTSPSGESSTAPGTSPSGESSTAPGTSPSGESSTAPGT | | |
| | STEPSEGSAPGSPAGSPTSTEEGTSTEPSEGSAPGSSPSASTGTGPGSSTPSGAT | | |
| | GSPGSSTPSGATGSPGSSTPSGATGSPGSSTPSGATGSPGASPGTSSTGSPGAS | | |
| | ASGAPSTGGTSPSGESSTAPGSTSSTAESPGPGTSPSGESSTAPGTSESATPESG | | |
| | PGTSTEPSEGSAPGTSTEPSEGSAPGSSPSASTGTGPGSSTPSGATGSPGASPG | | |
| | TSSTGSPGTSTPESGSASPGTSPSGESSTAPGTSPSGESSTAPGTSESATPESGP | | |
| | GSEPATSGSETPGTSTEPSEGSAPGSTSESPSGTAPGSTSESPSGTAPGTSTPES | | |
| | GSASPGSPAGSPTSTEEGTSESATPESGPGTSTEPSEGSAPGSPAGSPTSTEEGT | | |
| | SESATPESGPGSEPATSGSETPGSSTPSGATGSPGASPGTSSTGSPGSSTPSGAT | | |
| | GSPGSTSESPSGTAPGTSPSGESSTAPGSTSSTAESPGPGSSTPSGATGSPGASP | | |
| | GTSSTGSPGTPGSGTASSSPGSPAGSPTSTEEGSPAGSPTSTEEGTSTEPSEGSA | | |
| | P | | |
| AM923 | MAEPAGSPTSTEEGASPGTSSTGSPGSSTPSGATGSPGSSTPSGATGSPGTSTE | 741 | 1.5 |
| | PSEGSAPGSEPATSGSETPGSPAGSPTSTEEGSTSSTAESPGPGTSTPESGSASP | | |
| | GSTSESPSGTAPGSTSESPSGTAPGTSTPESGSASPGTSTPESGSASPGSEPATS | | |
| | GSETPGTSESATPESGPGSPAGSPTSTEEGTSTEPSEGSAPGTSESATPESGPGT | | |
| | STEPSEGSAPGTSTEPSEGSAPGSPAGSPTSTEEGTSTEPSEGSAPGTSTEPSEG | | |
| | SAPGTSESATPESGPGTSESATPESGPGTSTEPSEGSAPGTSTEPSEGSAPGTSE | | |
| | SATPESGPGTSTEPSEGSAPGSEPATSGSETPGSPAGSPTSTEEGSSTPSGATGS | | |
| | PGTPGSGTASSSPGSSTPSGATGSPGTSTEPSEGSAPGTSTEPSEGSAPGSEPAT | | |
| | SGSETPGSPAGSPTSTEEGSPAGSPTSTEEGTSTEPSEGSAPGASASGAPSTGG | | |
| | TSESATPESGPGSPAGSPTSTEEGSPAGSPTSTEEGSTSSTAESPGPGSTSESPS | | |
| | GTAPGTSPSGESSTAPGTPGSGTASSSPGSSTPSGATGSPGSSPSASTGTGPGS | | |
| | EPATSGSETPGTSESATPESGPGSEPATSGSETPGSTSSTAESPGPGSTSSTAES | | |
| | PGPGTSPSGESSTAPGSEPATSGSETPGSEPATSGSETPGTSTEPSEGSAPGSTS | | |
| | STAESPGPGTSTPESGSASPGSTSESPSGTAPGTSTEPSEGSAPGTSTEPSEGSA | | |
| | PGTSTEPSEGSAPGSSTPSGATGSPGSSPSASTGTGPGASPGTSSTGSPGSEPAT | | |
| | SGSETPGTSESATPESGPGSPAGSPTSTEEGSSTPSGATGSPGSSPSASTGTGPG | | |
| | ASPGTSSTGSPGTSESATPESGPGTSTEPSEGSAPGTSTEPSEGSAP | | |
| AE912 | MAEPAGSPTSTEEGTPGSGTASSSPGSSTPSGATGSPGASPGTSSTGSPGSPAG | 742 | 1.7 |
| | SPTSTEEGTSESATPESGPGTSTEPSEGSAPGSPAGSPTSTEEGTSTEPSEGSAP | | |
| | GTSTEPSEGSAPGTSESATPESGPGSEPATSGSETPGSEPATSGSETPGSPAGSP | | |
| | TSTEEGTSESATPESGPGTSTEPSEGSAPGTSTEPSEGSAPGSPAGSPTSTEEGT | | |
| | STEPSEGSAPGTSTEPSEGSAPGTSESATPESGPGTSTEPSEGSAPGTSESATPE | | |
| | SGPGSEPATSGSETPGTSTEPSEGSAPGTSTEPSEGSAPGTSESATPESGPGTSE | | |
| | SATPESGPGSPAGSPTSTEEGTSESATPESGPGSEPATSGSETPGTSESATPESG | | |
| | PGTSTEPSEGSAPGTSTEPSEGSAPGTSTEPSEGSAPGTSTEPSEGSAPGTSTEP | | |
| | SEGSAPGTSTEPSEGSAPGSPAGSPTSTEEGTSTEPSEGSAPGTSESATPESGPG | | |
| | SEPATSGSETPGTSESATPESGPGSEPATSGSETPGTSESATPESGPGTSTEPSE | | |
| | GSAPGTSESATPESGPGSPAGSPTSTEEGSPAGSPTSTEEGSPAGSPTSTEEGTS | | |
| | ESATPESGPGTSTEPSEGSAPGTSESATPESGPGSEPATSGSETPGTSESATPES | | |
| | GPGSEPATSGSETPGTSESATPESGPGTSTEPSEGSAPGSPAGSPTSTEEGTSES | | |
| | ATPESGPGSEPATSGSETPGTSESATPESGPGSPAGSPTSTEEGSPAGSPTSTEE | | |
| | GTSTEPSEGSAPGTSESATPESGPGTSESATPESGPGTSESATPESGPGSEPATS | | |
| | GSETPGSEPATSGSETPGSPAGSPTSTEEGTSTEPSEGSAPGTSTEPSEGSAPGS | | |
| | EPATSGSETPGTSESATPESGPGTSTEPSEGSAP | | |

### Example 29

### Calculation of TEPITOPE Scores

[0416] TEPITOPE scores of 9mer peptide sequence can be calculated by adding pocket potentials as described by Sturniolo [Sturniolo, T., et al. (1999) Nat Biotechnol, 17: 555]. In the present Example, separate Tepitope scores were calculated for individual HLA alleles. Table 27 shows as an example the pocket potentials for HLA*0101B, which occurs in high frequency in the Caucasian population. To calculate the TEPITOPE score of a peptide with sequence P1-P2-P3-P4-P5-P6-P7-P8-P9, the corresponding individual pocket potentials in Table 27 were added. The HLA*0101B score of a 9mer peptide with the sequence FDKLPRTSG (SEQ ID NO: 743) would be the sum of 0, −1.3, 0, 0.9, 0, −1.8, 0.09, 0, 0.

[0417] To evaluate the TEPITOPE scores for long peptides one can repeat the process for all 9mer subsequences of the sequences. This process can be repeated for the proteins encoded by other HLA alleles. Tables 28-31 give pocket potentials for the protein products of HLA alleles that occur with high frequency in the Caucasian population.

[0418] TEPITOPE scores calculated by this method range from approximately −10 to +10. However, 9mer peptides that lack a hydrophobic amino acid (FKLMVWY) (SEQ ID NO: 744) in P1 position have calculated TEPITOPE scores in the range of −1009 to −989. This value is biologically meaningless and reflects the fact that a hydrophobic amino acid serves as an anchor residue for HLA binding and peptides lacking a hydrophobic residue in P1 are considered non binders to HLA. Because most XTEN sequences lack hydrophobic residues, all combinations of 9mer subsequences will have TEPITOPEs in the range in the range of −1009 to −989. This method confirms that XTEN polypeptides may have few or no predicted T-cell epitopes.

TABLE 27
Pocket potential for HLA*0101B allele.

| Amino Acid | P1 | P2 | P3 | P4 | P5 | P6 | P7 | P8 | P9 |
|---|---|---|---|---|---|---|---|---|---|
| A | −999 | 0 | 0 | 0 | — | 0 | 0 | — | 0 |
| C | −999 | 0 | 0 | 0 | — | 0 | 0 | — | 0 |
| D | −999 | −1.3 | −1.3 | −2.4 | — | −2.7 | −2 | — | −1.9 |
| E | −999 | 0.1 | −1.2 | −0.4 | — | −2.4 | −0.6 | — | −1.9 |
| F | 0 | 0.8 | 0.8 | 0.08 | — | −2.1 | 0.3 | — | −0.4 |
| G | −999 | 0.5 | 0.2 | −0.7 | — | −0.3 | −1.1 | — | −0.8 |
| H | −999 | 0.8 | 0.2 | −0.7 | — | −2.2 | 0.1 | — | −1.1 |
| I | −1 | 1.1 | 1.5 | 0.5 | — | −1.9 | 0.6 | — | 0.7 |
| K | −999 | 1.1 | 0 | −2.1 | — | −2 | −0.2 | — | −1.7 |
| L | −1 | 1 | 1 | 0.9 | — | −2 | 0.3 | — | 0.5 |
| M | −1 | 1.1 | 1.4 | 0.8 | — | −1.8 | 0.09 | — | 0.08 |
| N | −999 | 0.8 | 0.5 | 0.04 | — | −1.1 | 0.1 | — | −1.2 |
| P | −999 | −0.5 | 0.3 | −1.9 | — | −0.2 | 0.07 | — | −1.1 |
| Q | −999 | 1.2 | 0 | 0.1 | — | −1.8 | 0.2 | — | −1.6 |
| R | −999 | 2.2 | 0.7 | −2.1 | — | −1.8 | 0.09 | — | −1 |
| S | −999 | −0.3 | 0.2 | −0.7 | — | −0.6 | −0.2 | — | −0.3 |
| T | −999 | 0 | 0 | −1 | — | −1.2 | 0.09 | — | −0.2 |
| V | −1 | 2.1 | 0.5 | −0.1 | — | −1.1 | 0.7 | — | 0.3 |
| W | 0 | −0.1 | 0 | −1.8 | — | −2.4 | −0.1 | — | −1.4 |
| Y | 0 | 0.9 | 0.8 | −1.1 | — | −2 | 0.5 | — | −0.9 |

TABLE 28
Pocket potential for HLA*0301B allele.

| Amino | | | | | | | | | |
|---|---|---|---|---|---|---|---|---|---|
| acid | P1 | P2 | P3 | P4 | P5 | P6 | P7 | P8 | P9 |
| A | −999 | 0 | 0 | 0 | — | 0 | 0 | — | 0 |
| C | −999 | 0 | 0 | 0 | — | 0 | 0 | — | 0 |
| D | −999 | −1.3 | −1.3 | 2.3 | — | −2.4 | −0.6 | — | −0.6 |
| E | −999 | 0.1 | −1.2 | −1 | — | −1.4 | −0.2 | — | −0.3 |
| F | −1 | 0.8 | 0.8 | −1 | — | −1.4 | 0.5 | — | 0.9 |
| G | −999 | 0.5 | 0.2 | 0.5 | — | −0.7 | 0.1 | — | 0.4 |
| H | −999 | 0.8 | 0.2 | 0 | — | −0.1 | −0.8 | — | −0.5 |
| I | 0 | 1.1 | 1.5 | 0.5 | — | 0.7 | 0.4 | — | 0.6 |
| K | −999 | 1.1 | 0 | −1 | — | 1.3 | −0.9 | — | −0.2 |
| L | 0 | 1 | 1 | 0 | — | 0.2 | 0.2 | — | −0 |
| M | 0 | 1.1 | 1.4 | 0 | — | −0.9 | 1.1 | — | 1.1 |
| N | −999 | 0.8 | 0.5 | 0.2 | — | −0.6 | −0.1 | — | −0.6 |
| P | −999 | −0.5 | 0.3 | −1 | — | 0.5 | 0.7 | — | −0.3 |
| Q | −999 | 1.2 | 0 | 0 | — | −0.3 | −0.1 | — | −0.2 |
| R | −999 | 2.2 | 0.7 | −1 | — | 1 | −0.9 | — | 0.5 |
| S | −999 | −0.3 | 0.2 | 0.7 | — | −0.1 | 0.07 | — | 1.1 |
| T | −999 | 0 | 0 | −1 | — | 0.8 | −0.1 | — | −0.5 |
| V | 0 | 2.1 | 0.5 | 0 | — | 1.2 | 0.2 | — | 0.3 |
| W | −1 | −0.1 | 0 | −1 | — | −1.4 | −0.6 | — | −1 |
| Y | −1 | 0.9 | 0.8 | −1 | — | −1.4 | −0.1 | — | 0.3 |

TABLE 29
Pocket potential for HLA*0401B allele.

| Amino | | | | | | | | | |
|---|---|---|---|---|---|---|---|---|---|
| acid | P1 | P2 | P3 | P4 | P5 | P6 | P7 | P8 | P9 |
| A | −999 | 0 | 0 | 0 | — | 0 | 0 | — | 0 |
| C | −999 | 0 | 0 | 0 | — | 0 | 0 | — | 0 |
| D | −999 | −1.3 | −1.3 | 1.4 | — | −1.1 | −0.3 | — | −1.7 |
| E | −999 | 0.1 | −1.2 | 1.5 | — | −2.4 | 0.2 | — | −1.7 |
| F | 0 | 0.8 | 0.8 | −0.9 | — | −1.1 | −1 | — | −1 |
| G | −999 | 0.5 | 0.2 | −1.6 | — | −1.5 | −1.3 | — | −1 |
| H | −999 | 0.8 | 0.2 | 1.1 | — | −1.4 | 0 | — | 0.08 |
| I | −1 | 1.1 | 1.5 | 0.8 | — | −0.1 | 0.08 | — | −0.3 |
| K | −999 | 1.1 | 0 | −1.7 | — | −2.4 | −0.3 | — | −0.3 |
| L | −1 | 1 | 1 | 0.8 | — | −1.1 | 0.7 | — | −1 |
| M | −1 | 1.1 | 1.4 | 0.9 | — | −1.1 | 0.8 | — | −0.4 |
| N | −999 | 0.8 | 0.5 | 0.9 | — | 1.3 | 0.6 | — | −1.4 |
| P | −999 | −0.5 | 0.3 | −1.6 | — | 0 | −0.7 | — | −1.3 |
| Q | −999 | 1.2 | 0 | 0.8 | — | −1.5 | 0 | — | 0.5 |
| R | −999 | 2.2 | 0.7 | −1.9 | — | −2.4 | −1.2 | — | −1 |
| S | −999 | −0.3 | 0.2 | 0.8 | — | 1 | −0.2 | — | 0.7 |
| T | −999 | 0 | 0 | 0.7 | — | 1.9 | −0.1 | — | −1.2 |
| V | −1 | 2.1 | 0.5 | −0.9 | — | 0.9 | 0.08 | — | −0.7 |
| W | 0 | −0.1 | 0 | −1.2 | — | −1 | −1.4 | — | −1 |
| Y | 0 | 0.9 | 0.8 | −1.6 | — | −1.5 | −1.2 | — | −1 |

TABLE 30
Pocket potential for HLA*0701B allele.

| Amino | | | | | | | | | |
|---|---|---|---|---|---|---|---|---|---|
| acid | P1 | P2 | P3 | P4 | P5 | P6 | P7 | P8 | P9 |
| A | −999 | 0 | 0 | 0 | — | 0 | 0 | — | 0 |
| C | −999 | 0 | 0 | 0 | — | 0 | 0 | — | 0 |
| D | −999 | −1.3 | −1.3 | −1.6 | — | −2.5 | −1.3 | — | −1.2 |
| E | −999 | 0.1 | −1.2 | −1.4 | — | −2.5 | 0.9 | — | −0.3 |
| F | 0 | 0.8 | 0.8 | 0.2 | — | −0.8 | 2.1 | — | 2.1 |
| G | −999 | 0.5 | 0.2 | −1.1 | — | −0.6 | 0 | — | −0.6 |
| H | −999 | 0.8 | 0.2 | 0.1 | — | −0.8 | 0.9 | — | −0.2 |
| I | −1 | 1.1 | 1.5 | 1.1 | — | −0.5 | 2.4 | — | 3.4 |
| K | −999 | 1.1 | 0 | −1.3 | — | −1.1 | 0.5 | — | −1.1 |
| L | −1 | 1 | 1 | −0.8 | — | −0.9 | 2.2 | — | 3.4 |
| M | −1 | 1.1 | 1.4 | −0.4 | — | −0.8 | 1.8 | — | 2 |
| N | −999 | 0.8 | 0.5 | −1.1 | — | −0.6 | 1.4 | — | −0.5 |
| P | −999 | −0.5 | 0.3 | −1.2 | — | −0.5 | −0.2 | — | −0.6 |
| Q | −999 | 1.2 | 0 | −1.5 | — | −1.1 | 1.1 | — | −0.9 |
| R | −999 | 2.2 | 0.7 | −1.1 | — | −1.1 | 0.7 | — | −0.8 |
| S | −999 | −0.3 | 0.2 | 1.5 | — | 0.6 | 0.4 | — | −0.3 |
| T | −999 | 0 | 0 | 1.4 | — | −0.1 | 0.9 | — | 0.4 |
| V | −1 | 2.1 | 0.5 | 0.9 | — | 0.1 | 1.6 | — | 2 |
| W | 0 | −0.1 | 0 | −1.1 | — | −0.9 | 1.4 | — | 0.8 |
| Y | 0 | 0.9 | 0.8 | −0.9 | — | −1 | 1.7 | — | 1.1 |

TABLE 31
Pocket potential for HLA*1501B allele.

| Amino | | | | | | | | | |
|---|---|---|---|---|---|---|---|---|---|
| acid | P1 | P2 | P3 | P4 | P5 | P6 | P7 | P8 | P9 |
| A | −999 | 0 | 0 | 0 | — | 0 | 0 | — | 0 |
| C | −999 | 0 | 0 | 0 | — | 0 | 0 | — | 0 |
| D | −999 | −1.3 | −1.3 | −0.4 | — | −0.4 | −0.7 | — | −1.9 |
| E | −999 | 0.1 | −1.2 | −0.6 | — | −1 | −0.7 | — | −1.9 |
| F | −1 | 0.8 | 0.8 | 2.4 | — | −0.3 | 1.4 | — | −0.4 |
| G | −999 | 0.5 | 0.2 | 0 | — | 0.5 | 0 | — | −0.8 |
| H | −999 | 0.8 | 0.2 | 1.1 | — | −0.5 | 0.6 | — | −1.1 |
| I | 0 | 1.1 | 1.5 | 0.6 | — | 0.05 | 1.5 | — | 0.7 |
| K | −999 | 1.1 | 0 | −0.7 | — | −0.3 | −0.3 | — | −1.7 |
| L | 0 | 1 | 1 | 0.5 | — | 0.2 | 1.9 | — | 0.5 |
| M | 0 | 1.1 | 1.4 | 1 | — | 0.1 | 1.7 | — | 0.08 |
| N | −999 | 0.8 | 0.5 | −0.2 | — | 0.7 | 0.7 | — | −1.2 |
| P | −999 | −0.5 | 0.3 | −0.3 | — | −0.2 | 0.3 | — | −1.1 |
| Q | −999 | 1.2 | 0 | −0.8 | — | −0.8 | −0.3 | — | −1.6 |
| R | −999 | 2.2 | 0.7 | 0.2 | — | 1 | −0.5 | — | −1 |
| S | −999 | −0.3 | 0.2 | −0.3 | — | 0.6 | 0.3 | — | −0.3 |
| T | −999 | 0 | 0 | −0.3 | — | −0 | 0.2 | — | −0.2 |
| V | 0 | 2.1 | 0.5 | 0.2 | — | −0.3 | 0.3 | — | 0.3 |
| W | −1 | −0.1 | 0 | 0.4 | — | −0.4 | 0.6 | — | −1.4 |
| Y | −1 | 0.9 | 0.8 | 2.5 | — | 0.4 | 0.7 | — | −0.9 |

### Example 30

### Assay for Effects of BFXTEN on Cardiac Remodeling

[0419] BFXTEN comprising GLP-1 and an exendin-4 would be evaluated for biologic activity in a rat model of cardiac remodeling. Male Sprague-Dawley rats (250-300 g) are anesthetized by using 5% isoflurane and a left thoracotomy performed. The left main anterior descending artery (LAD) are ligated to induce myocardial infarction. In addition, sham animals (n=10) would be subjected to the same surgical procedure without ligation of the LAD.

[0420] After two weeks recovery, rats are treated with graded doses of the BFXTEN comprising GLP-1 and exendin-4, or GLP-1 not linked to XTEN as a positive control, or vehicle, delivered via subcutaneous infusion for 11 weeks. Echocardiography is performed at the 3rd, 5th, 9th, and 13th week of myocardial infarction. Left ventricular (LV) end systolic dimension (ESD) and diastolic dimension (EDD), LV systolic volume and diastolic volume, left atrial volume parameters would be recorded. At the 13th week of MI, the hearts would be excised, the LV mass weighed and LV mass/body weight ratio determined.

[0421] The vehicle control group would be expected to show an increased E/A ratio (peak velocity of early diastolic filling/peak velocity of atrial contraction), compared to sham controls. BFXTEN demonstrating GLP-1 and exendin agonist activity would be expected to have a lower, or no increase in the ratio over the measured time points during CHF progression.

[0422] Administration of BFXTEN with GLP-1 exendin-4 would be expected to eliminate the LV end diastolic pressure (LVEDP) elevation, and cardiac output and +dp/dtmax would be reduced, as compared to the sham group, and may be normalized. Administration of GLP-1 and exendin-4 BFXTEN would also be expected to reduce LV mass, LV end diastolic dimension and systolic dimension in comparison to vehicle during the progression of CHF. The administration of bioactive BFXTEN is expected to significantly reduce cardiac remodeling, as assessed histologically, including reduction in infarct size compared to the control group. Further, administration of bioactive GLP-1 and exendin-4 BFXTEN would improve exercise capacity (EC) and exercise efficiency (EC/VO2) during a treadmill test in animals, compared to vehicle control treated animals. Results of bioactive, BFXTEN would be expected to demonstrate cardioprotective effects in the MI-induced rat model that include slowed enlargement of LV chamber, improved cardiac diastolic and systolic function, improved exercise capacity and efficiency, attenuated baseline plasma lactate, improved exercise capacity/peak lactate ratio, reduced infarction sire attenuated LV weight, and improved insulin sensitivity. BFXTEN providing such results would be expected to have utility in the treatment or prevention of cardiovascular disease.

Lengthy table referenced here
US20110312881A1-20111222-T00001
Please refer to the end of the specification for access instructions.

Lengthy table referenced here
US20110312881A1-20111222-T00002
Please refer to the end of the specification for access instructions.

Lengthy table referenced here
US20110312881A1-20111222-T00003
Please refer to the end of the specification for access instructions.

Lengthy table referenced here
US20110312881A1-20111222-T00004
Please refer to the end of the specification for access instructions.

Lengthy table referenced here
US20110312881A1-20111222-T00005
Please refer to the end of the specification for access instructions.

Lengthy table referenced here
US20110312881A1-20111222-T00006
Please refer to the end of the specification for access instructions.

Lengthy table referenced here
US20110312881A1-20111222-T00007
Please refer to the end of the specification for access instructions.

Lengthy table referenced here
US20110312881A1-20111222-T00008
Please refer to the end of the specification for access instructions.

LENGTHY TABLES
The patent application contains a lengthy table section. A copy of the table is available in electronic form from the USPTO web site (http://seqdata.uspto.gov/?pageRequest=docDetail&DocID=US20110312881A1). An electronic copy of the table will also be available from the USPTO upon request and payment of the fee set forth in 37 CFR 1.19(b)(3).

What is claimed is:

1. An isolated monomeric fusion protein of formula V:
(XTEN)ᵤ-(S)ᵥ-(BP1)-(S)_{w}-(XTEN)-(S)ₓ-(BP2)-(S)_{y}-(XTEN)_{z} V
wherein independently for each occurrence:
(a) BP1 is a is a biologically active protein comprising a sequence that exhibits at least 90% sequence identity to a sequence from Table 1;
(b) BP2 is a is a biologically active protein comprising a sequence that exhibits at least 90% sequence identity to a sequence from Table 1 that is different from the BP1 of (a);
(c) S is a spacer sequence having between 1 to about 50 amino acid residues that can optionally comprise a cleavage sequence from Table 6;
(d) u is either 0 or 1;
(e) v is either 0 or 1;
(f) w is either 0 or 1;
(g) x is either 0 or 1;
(h) y is either 0 or 1;
(i) z is either 0 or 1, with the proviso that u+v+w+x+y+z≧1; and
(j) XTEN is an extended recombinant polypeptide comprising greater than about 100 to about 3000 amino acids wherein the XTEN is characterized in that:
(i) the sequence is substantially non-repetitive sequence such that: (1) the XTEN sequence contains no three contiguous amino acids that are identical unless the amino acids are serine residues; or (2) at least about 80% of the XTEN sequence consists of non-overlapping sequence motifs, each of the sequence motifs comprising about 9 to about 14 amino acid residues, wherein any two contiguous amino acid residues does not occur more than twice in each of the sequence motifs;
(ii) the sum of glycine (G), alanine (A), serine (S), threonine (T), glutamate (E) and proline (P) residues constitutes more than about 80% of the total amino acid sequence of the XTEN;
(iii) the sequence lacks a predicted T-cell epitope when analyzed by TEPITOPE algorithm, wherein the TEPITOPE algorithm prediction for epitopes within the XTEN sequence is based on a score of −9.
(iv) the sequence has greater than 90% random coil formation as determined by GOR algorithm;
(v) the sequence has less than 2% alpha helices and 2% beta-sheets as determined by Chou-Fasman algorithm; and
(k) the fusion protein, when administered to a subject, exhibits a terminal half-life at least about three-fold longer compared to the corresponding BP1 of (a) not linked to the XTEN and administered at a comparable dose to a subject and/or three-fold longer compared to the corresponding BP2 of (b) not linked to the XTEN and administered at a comparable dose to a subject.

2. An isolated monomeric fusion protein of formula VI:
(XTEN)ᵥ-(S)_{w}-(BP1)-(S)ₓ-(BP2)-(S)_{y}-(XTEN)_{z} VI
wherein independently for each occurrence:
(a) BP1 is a is a biologically active protein comprising a sequence that exhibits at least 90% sequence identity to a sequence from Table 1;
(b) BP2 is a is a biologically active protein comprising a sequence that exhibits at least 90% sequence identity to a sequence from Table 1 that is different from the BP1 of (a);
(c) S is a spacer sequence having between 1 to about 50 amino acid residues that can optionally comprise a cleavage sequence from Table 6;
(d) v is either 0 or 1;
(e) w is either 0 or 1;
(f) x is either 0 or 1;
(g) y is either 0 or 1;
(h) z is either 0 or 1, with the proviso that v+w+x+y+z≧1;
(i) XTEN is an extended recombinant polypeptide comprising greater than about 100 to about 3000 amino acids wherein the XTEN is characterized in that:
(i) the sequence is substantially non-repetitive sequence such that: (1) the XTEN sequence contains no three contiguous amino acids that are identical unless the amino acids are serine residues; or (2) at least about 80% of the XTEN sequence consists of non-overlapping sequence motifs, each of the sequence motifs comprising about 9 to about 14 amino acid residues, wherein any two contiguous amino acid residues does not occur more than twice in each of the sequence motifs;
(ii) the sum of glycine (G), alanine (A), serine (S), threonine (T), glutamate (E) and proline (P) residues constitutes more than about 80% of the total amino acid sequence of the XTEN;
(iii) the sequence lacks a predicted T-cell epitope when analyzed by TEPITOPE algorithm, wherein the TEPITOPE algorithm prediction for epitopes within the XTEN sequence is based on a score of −9.
(iv) the sequence has greater than 90% random coil formation as determined by GOR algorithm; and
(v) the sequence has less than 2% alpha helices and 2% beta-sheets as determined by Chou-Fasman algorithm; and
(j) the fusion protein, when administered to a subject, exhibits a terminal half-life at least about three-fold longer compared to the corresponding BP1 of (a) not linked to the XTEN and administered at a comparable dose to a subject and/or three-fold longer compared to the corresponding BP2 of (b) not linked to the XTEN and administered at a comparable dose to a subject.

3. The isolated fusion protein of claim 1 or 2, wherein the XTEN exhibit at least 90% sequence identity to one or more sequences from Table 4.

4. The isolated fusion protein of claim 1 or 2, wherein administration of multiple consecutive doses using a therapeutically effective dose regimen of the fusion protein to a subject in need thereof results in a gain in time of at least three-fold between consecutive Cₘₐₓ peaks and/or Cₘᵢₙ troughs for blood levels of the fusion protein compared to the corresponding BP1 of (a) and/or the BP2 of (b) not linked to the XTEN and administered to a subject at a therapeutically effective dose regimen for the BP1 or BP2.

5. The isolated fusion protein of claim 1 or 2, wherein administration of multiple consecutive doses using a therapeutically effective dose regimen of the fusion protein to a subject in need thereof results in an improvement in at least one measured parameter using an accumulatively smaller amount in moles of the fusion protein compared to the corresponding BP1 and/or BP2 not linked to the XTEN and administered at a therapeutically effective dose regimen for the BP1 and/or BP2 to a subject.

6. The isolated fusion protein of claim 5, wherein the one measured parameter is selected from fasting glucose level, response to oral glucose tolerance test, peak change of postprandial glucose from baseline glucose level, HA_{1c} level, daily caloric intake, satiety, rate of gastric emptying, insulin secretion in response to glucose challenge, peripheral insulin sensitivity, glucose level in response to insulin challenge, beta cell mass, and body weight reduction.

7. A composition comprising a first fusion protein and a second fusion protein, wherein:
(a) the first fusion protein comprises a first biologically active protein (BP1) comprising a sequence that exhibits at least 90% sequence identity to a sequence from Table 1, wherein the BP1 is linked to one or more extended recombinant polypeptides (XTEN) each comprising greater than about 100 to about 3000 amino acid residues;
(b) the second fusion protein comprises a second biologically active protein (BP2) comprising a sequence that exhibits at least 90% sequence identity to a sequence from Table 1 and that is different from the BP1 of (a), wherein the BP2 is linked to one or more extended recombinant polypeptides (XTEN) each comprising greater than about 100 to about 3000 amino acid residues;
(c) the XTEN of (a) and (b) is characterized in that:
(i) the sequence is substantially non-repetitive sequence such that (1) the XTEN sequence contains no three contiguous amino acids that are identical unless the amino acids are serine residues, or (2) at least about 80% of the XTEN sequence consists of non-overlapping sequence motifs, each of the sequence motifs comprising about 9 to about 14 amino acid residues, wherein any two contiguous amino acid residues does not occur more than twice in each of the sequence motifs;
(ii) the sum of glycine (G), alanine (A), serine (S), threonine (T), glutamate (E) and proline (P) residues constitutes more than about 80% of the total amino acid sequence of the XTEN;
(iii) the sequence lacks a predicted T-cell epitope when analyzed by TEPITOPE algorithm, wherein the TEPITOPE algorithm prediction for epitopes within the XTEN sequence is based on a score of −9.
(iv) the sequence has greater than 90% random coil formation as determined by GOR algorithm; and
(v) the sequence has less than 2% alpha helices and 2% beta-sheets as determined by Chou-Fasman algorithm;
(d) the first and the second fusion protein are at a fixed ratio in the composition of about 1:1 to about 1:1500; and
(e) the composition, when administered to a subject, exhibits a terminal half-life for the first and the second fusion protein in the subject at least about three-fold longer compared to the corresponding BP1 of (a) not linked to the XTEN and administered at a comparable dose to a subject and/or the BP2 of (b) not linked to the XTEN and administered at a comparable dose to a subject.

8. The composition of claim 7, wherein the first and/or the second fusion protein further comprises a spacer sequence between the biologically active protein and the XTEN having between 1 to about 50 amino acid residues that can optionally include a cleavage sequence from Table 6.

9. The composition of claim 7, wherein each of the XTEN has a subsequence score less than 3.

10. The composition of claim 7, wherein each of the XTEN is further characterized in that:
(a) the sum of asparagine and glutamine residues is less than 10% of the total amino acid sequence of the XTEN;
(b) the sum of methionine and tryptophan residues is less than 2% of the total amino acid sequence of the XTEN; and/or
(c) no one type of amino acid constitutes more than 30% of the XTEN sequence.

11. The composition of claim 7, wherein:
(a) the first fusion protein is of formula I
(BP1)-(S)ₓ-(XTEN) I
or formula III
(XTEN)-(S)ₓ-(BP1) III
(b) the second fusion protein is of formula II
(BP2)-(S)_{y}-(XTEN) II
or formula IV
(XTEN)-(S)_{y}-(BP2) IV
wherein independently for each occurrence:
(i) BP1 is a is a biologically active protein comprising a sequence that exhibits at least 90% sequence identity to a sequence from Table 1;
(ii) BP2 is a is a biologically active protein comprising a sequence that exhibits at least 90% sequence identity to a sequence from Table 1 that is different from the BP1 of (i);
(iii) S is a spacer sequence having between 1 to about 50 amino acid residues that can optionally include a cleavage sequence from Table 6;
(iv) x is either 0 or 1; and
(v) y is either 0 or 1.

12. The composition of claim 7, wherein administration of a therapeutically effective amount of the composition to a subject in need thereof results in a gain in time of at least three-fold spent within a therapeutic window for the first fusion protein of (a) and the second fusion protein of (b) compared to the corresponding BP1 of (a) not linked to the XTEN and administered at a comparable dose to a subject and/or the BP2 of (b) not linked to the XTEN and administered at a comparable dose to a subject.

13. A pharmaceutical composition comprising the fusion protein of claim 1 or 2, and at least one pharmaceutically acceptable carrier.

14. A method of treating a metabolic or cardiovascular condition, comprising administering a therapeutically effective amount of the pharmaceutical composition of claim 13 to a subject in need thereof.

15. The method of claim 14, wherein the condition is selected from the group consisting of type 1 diabetes, type 2 diabetes, obesity, hyperglycemia, hyperinsulinemia, decreased insulin production, insulin resistance, syndrome X, excessive appetite, insufficient satiety, glucagonomas, dyslipidemia, retinal neurodegenerative processes, myocardial infarction, cardiac valve disease, stroke, post-surgical catabolic changes, hibernating myocardium or diabetic cardiomyopathy, hypertrophic cardiomyopathy, heart insufficiency, aortic stenosis, valvular regurgitation, and intermittent claudication.

16. An isolated nucleic acid comprising a polynucleotide sequence selected from (a) a polynucleotide encoding the fusion protein of claim 1 or claim 2, or (b) the complement of the polynucleotide of (a).

17. An expression vector comprising the polynucleotide sequence of claim 16.

18. The expression vector of claim 17, further comprising a recombinant regulatory sequence operably linked to the polynucleotide sequence, wherein the regulatory sequence is a promoter.

19. A host cell, comprising the expression vector of claim 17.

20. An isolated fusion protein comprising a sequence that has at least 90% sequence identity to a sequence selected from Table 33, Table 34, Table 35, Table 36, Table 37, and Table 38.

The application's sequence listing, which the Patent Office published only in electronic form, follows.

SEQUENCE LISTING (2377 sequences)

SEQ ID NO: 1 - protein, 52 aa, Unknown
  Description of Unknown: Adrenomedullin polypeptide
YRQSMNNFQGLRSFGCRFGTCTVQKLAHQIYQFTDKDKDNVAPRSKISPQGY

SEQ ID NO: 2 - protein, 37 aa, Rattus sp.
KCNTATCATQRLANFLVRSSNNLGPVLPPTNVGSNTY

SEQ ID NO: 3 - protein, 37 aa, Homo sapiens [sequence omitted]

SEQ ID NO: 4 - protein, 153 aa, Unknown
  Description of Unknown: IL1ra kineret polypeptide
MRPSGRKSSKMQAFRIWDVNQKTFYLRNNQLVAGYLQGPNVNLEEKIDVVPIEPHALFLGIHGGKMCLSCVKSGDETRLQLEAVNITDLSENRKQDKRFAFIRSDSGPTTSFESAACPGWFLCTAMEADQPVSLTNMPDEGVMVTKFYFQEDE

SEQ ID NO: 5 - protein, 32 aa, Homo sapiens
CGNLSTCMLGTYTQDFNKFHTFPQTAIGVGAP

SEQ ID NO: 6 - protein, 32 aa, Unknown
  Description of Unknown: Salmon calcitonin peptide
CSNLSTCVLGKLSQELHKLQTYPRTNTGSGTP

SEQ ID NO: 7 - protein, 36 aa, Homo sapiens
ACDTATCVTHRLAGLLSRSGGVVKNMVPTNVGSKAF

SEQ ID NO: 8 - protein, 37 aa, Homo sapiens
ACNTATCVTHRLAGLLSRSGGMVKSNFVPTNVGSKAF

SEQ ID NO: 9 - protein, 216 aa, Unknown
  Description of Unknown: Fibroblast growth factor-19 polypeptide
MRSGCVVVHVWILAGLWLAVAGRPLAFSDAGPHVHYGWGDPIRLRHLYTSGPHGLSSCFLRIRADGVVDCARGQSAHSLLEIKAVALRTVAIKGVHSVRYLCMGADGKMQGLLQYSEEDCAFEEEIRPDGYNVYRSEKHRLPVSLSSAKQRQLYKNRGFLPLSHFLPMLPMVPEEPEDLRGHLESDMFSSPLETDSMDPFGLVTGLEAVRSPSFEK

SEQ ID NO: 10 - protein, 209 aa, Unknown
  Description of Unknown: Fibroblast growth factor-21 polypeptide
MDSDETGFEHSGLWVSVLAGLLLGACQAHPIPDSSPLLQFGGQVRQRYLYTDDAQQTEAHLEIREDGTVGGAADQSPESLLQLKALKPGVIQILGVKTSRFLCQRPDGALYGSLHFDPEACSFRELLLEDGYNVYQSEAHGLPLHLPGNKSPHRDPAPRGPARFLPLPGLPPALPEPPGILAPQPPDVGSSDPLSMVGPSQGRSPSYAS

SEQ ID NO: 11 - protein, 34 aa, Unknown
  Description of Unknown: Gastrin peptide
QLGPQGPPHLVADPSKKQGPWLEEEEEAYGWMDF

SEQ ID NO: 12 - protein, 42 aa, Unknown
  Description of Unknown: Gastrin inhibitory polypeptide
YAEGTFISDYSIAMDKIHQQDFVNWLLAQKGKKNDWKHNITQ

SEQ ID NO: 13 - protein, 28 aa, Unknown
  Description of Unknown: Ghrelin peptide
GSSFLSPEHQRVQQRKESKKPPAKLQPR

SEQ ID NO: 14 - protein, 70 aa, Unknown
  Description of Unknown: Insulin-like growth factor-1 polypeptide
GPETLCGAELVDALQFVCGDRGFYFNKPTGYGSSSRRAPQTGIVDECCFRSCDLRRLEMYCAPLKPAKSA

SEQ ID NO: 15 - protein, 67 aa, Unknown
  Description of Unknown: Insulin-like growth factor-2 polypeptide
AYRPSETLCGGELVDTLQFVCGDRGFYFSRPASRVSRRSRGIVEECCFRSCDLALLETYCATPAKSE

SEQ ID NO: 16 - protein, 149 aa, Unknown
  Description of Unknown: Islet neogenesis-associated polypeptide
EESQKKLPSSRITCPQGSVAYGSYCYSLILIPQTWSNAELSCQMHFSGHLAFLLSTGEITFVSSLVKNSLTAYQYIWIGLHDPSHGTLPNGSGWKWSSSNVLTFYNWERNPSIAADRGYCAVLSQKSGFQKWRDFNCENELPYICKFKV

SEQ ID NO: 17 - protein, 37 aa, Unknown
  Description of Unknown: Pramlintide peptide
  C-term amidated
KCNTATCATNRLANFLVHSSNNFGPILPPTNVGSNTY

SEQ ID NO: 18 - protein, 28 aa, Unknown
  Description of Unknown: Alpha-natriuretic peptide
SLRRSSCFGGRMDRIGAQSGLGCNSFRY

SEQ ID NO: 19 - protein, 32 aa, Homo sapiens
SPKMVQGSGGFGRKMDRISSSSGLGCKVLRRH

SEQ ID NO: 20 - protein, 32 aa, Rattus sp.
NSKMAHSSSCFGQKIDRIGAVSRLGCDGLRLF

SEQ ID NO: 21 - protein, 22 aa, Sus sp.
GLSKGCFGLKLDRIGSMSGLGC

SEQ ID NO: 22 - protein, 115 aa, Unknown
  Description of Unknown: Cholecystokinin polypeptide
MNSGVCLCVLMAVLAAGALTQPVPPADPAGSGLQRAEEAPRRQLRVSQRTDGESRAHLGALLARYIQQARKAPSGRMSIVKNLQNLDPSHRISDRDYMGWMDFGRRSAEEYEYPS

SEQ ID NO: 23 - protein, 58 aa, Unknown
  Description of Unknown: Cholecystokinin-58 polypeptide
VSQRTDGESRAHLGALLARYIQQARKAPSGRMSIVKNLQNLDPSHRISDRDYMGWMDF

SEQ ID NO: 24 - protein, 33 aa, Unknown
  Description of Unknown: Cholecystokinin-33 peptide
KAPSGRMSIVKNLQNLDPSHRISDRDYMGWMDF

SEQ ID NO: 25 - protein, 8 aa, Unknown [sequence omitted]

SEQ ID NO: 26 - protein, 7 aa, Unknown
  Description of Unknown: Cholecystokinin-7 peptide
YMGWMDF

SEQ ID NO: 27 - protein, 8 aa, Unknown [sequence omitted]

SEQ ID NO: 28 - protein, 5 aa, Unknown
  Description of Unknown: Cholecystokinin-5 peptide
GWMDF

SEQ ID NO: 29 - protein, 39 aa, Unknown
  Description of Unknown: Exendin-3 peptide
HSDGTFTSDLSKQMEEEAVRLFIEWLKNGGPSSGAPPPS

SEQ ID NO: 30 - protein, 39 aa, Unknown
  Description of Unknown: Exendin-4 peptide
HGEGTFTSDLSKQMEEEAVRLFIEWLKNGGPSSGAPPPS

SEQ ID NO: 31 - protein, 22 aa, Unknown
  Description of Unknown: Gastrin-17 peptide
DPSKKQGPWLEEEEEAYGWMDF

SEQ ID NO: 32 - protein, 29 aa, Unknown
  Description of Unknown: Glucagon peptide
HSQGTFTSDYSKYLDSRRAQDFVQWLMNT

SEQ ID NO: 33 - protein, 37 aa, Homo sapiens
HDEFERHAEGTFTSDVSSTLEGQAALEFIAWLVKGRG

SEQ ID NO: 34 - protein, 30 aa, Homo sapiens
HAEGTFTSDVSSYLEGQAALEFIAWLVKGR

SEQ ID NO: 35 - protein, 31 aa, Homo sapiens
HAEGTFTSDVSSTLEGQAALEFIAWLVKGRG

SEQ ID NO: 36 - protein, 37 aa, Unknown
  Description of Unknown: Frog glucagon-like peptide-1
HAEGTYTNDVTEYLEEKAAKEFIEWLIKGKPKKIRYS

SEQ ID NO: 37 - protein, 33 aa, Homo sapiens
HADGSFSDEMNTILDNLAARDFINWLIETKITD

SEQ ID NO: 38 - protein, 31 aa, Unknown
  Description of Unknown: Frog glucagon-like peptide-2
  C-term hydroxylated
HAEGTFTNDMTNYLEEKAAKEFVGWLIKGRP

SEQ ID NO: 39 - protein, 47 aa, Unknown
  Description of Unknown: Intermedin (AFP-6) polypeptide
TQAQLLRVGCVLGTCQVQNLSHRLWQLMGPAGRQDSAPVDPSSPHSY

SEQ ID NO: 40 - protein, 146 aa, Homo sapiens
VPIQKVQDDTKTLIKTIVTRINDISHTQSVSSKQKVTGLDFIPGLHPILTLSKMDQTLAVYQQILTSMPSRNVIQISNDLENLRDLLHVLAFSKSCHLPWASGLETLDSLGGVLEASGYSTEVVALSRLQGSLQDMLWQLDLSPGC

SEQ ID NO: 41 - protein, 8 aa, Sus sp.
YFLFRPRN

SEQ ID NO: 42 - protein, 9 aa, Unknown
  Description of Unknown: Neuromedin (U-9) peptide
GYFLFRPRN

SEQ ID NO: 43 - protein, 25 aa, Homo sapiens
FRVDEEFQSPFASQSRGYFLFRPRN

SEQ ID NO: 44 - protein, 25 aa, Sus sp.
FKVDEEFQGPIVSQNRRYFLFRPRN

SEQ ID NO: 45 - protein, 33 aa, Homo sapiens
ILQRGSGTAAVDFTKKDHTATWGRPFFLFRPRN

SEQ ID NO: 46 - protein, 23 aa, Rattus sp.
YKVNEYQGPVAPSGGFFLFRPRN

SEQ ID NO: 47 - protein, 37 aa, Unknown
  Description of Unknown: Oxyntomodulin peptide
HSQGTFTSDYSKYLDSRRAQDFVQWLMNTKRNRNNIA

SEQ ID NO: 48 - protein, 36 aa, Unknown
  Description of Unknown: Peptide YY
YPIKPEAPGEDASPEELNRYYASLRHYLNLVTRQRY

SEQ ID NO: 49 - protein, 32 aa, Unknown
  Description of Unknown: Urodilatin peptide
TAPRSLRRSSCFGGRMDRIGAQSGLGCNSFRY

SEQ ID NO: 50 - protein, 40 aa, Unknown
  Description of Unknown: Urocortin-1 peptide
DNPSLSIDLTFHLLRTLLELARTQSQRERAEQNRIIFDSV

SEQ ID NO: 51 - protein, 41 aa, Unknown
  Description of Unknown: Urocortin-2 peptide
IVLSLDVPIGLLQILLEQARARAAREQATTNARILARVGHC

SEQ ID NO: 52 - protein, 38 aa, Unknown
  Description of Unknown: Urocortin-3 peptide
FTLSLDVPTNIMNLLFNIAKAKNLRAQAAANAHLMAQI

SEQ ID NO: 53 - protein, 37 aa, Artificial Sequence; identical to SEQ ID NO: 17
  Description of Artificial Sequence: Synthetic polypeptide

SEQ ID NO: 54 - protein, 37 aa, Artificial Sequence
  Description of Artificial Sequence: Synthetic polypeptide
  MOD_RES (10)..(10): Asn, Gln or Tyr
  MOD_RES (25)..(25): Ser, Pro or Gly
  MOD_RES (28)..(29): Ser, Pro or Gly
KCNTATCATXRLANFLVHSSNNFGXILXXTNVGSNTY

SEQ ID NO: 55 - protein, 37 aa, Artificial Sequence
  Description of Artificial Sequence: Synthetic polypeptide
KCNTATCATNRLANFLVHSSNNFGGILGGTNVGSNTY

SEQ ID NO: 56 - protein, 37 aa, Artificial Sequence; identical to SEQ ID NO: 55
  Description of Artificial Sequence: Synthetic polypeptide
  C-term amidated

SEQ ID NO: 57 - protein, 39 aa, Heloderma suspectum; identical to SEQ ID NO: 30

SEQ ID NO: 58 - protein, 38 aa, Homo sapiens
FLFHYSKTQKLGKSNVVEELQSPFASQSRGYFLFRPRN

SEQ ID NO: 59 - protein, 33 aa, Homo sapiens; identical to SEQ ID NO: 45

SEQ ID NO: 60 - protein, 12 aa, Artificial Sequence
  Description of Artificial Sequence: Synthetic peptide
GESPGGSSGSES

SEQ ID NO: 61 - protein, 12 aa, Artificial Sequence
  Description of Artificial Sequence: Synthetic peptide
GSEGSSGPGESS

SEQ ID NO: 62 - protein, 12 aa, Artificial Sequence
  Description of Artificial Sequence: Synthetic peptide
GSSESGSSEGGP

SEQ ID NO: 63 - protein, 12 aa, Artificial Sequence
  Description of Artificial Sequence: Synthetic peptide
GSGGEPSESGSS

SEQ ID NO: 64 - protein, 12 aa, Artificial Sequence
  Description of Artificial Sequence: Synthetic peptide
GSPAGSPTSTEE

SEQ ID NO: 65 - protein, 12 aa, Artificial Sequence
  Description of Artificial Sequence: Synthetic peptide
GSEPATSGSETP

SEQ ID NO: 66 - protein, 12 aa, Artificial Sequence
  Description of Artificial Sequence: Synthetic peptide
GTSESATPESGP

SEQ ID NO: 67 - protein, 12 aa, Artificial Sequence
  Description of Artificial Sequence: Synthetic peptide
GTSTEPSEGSAP

SEQ ID NO: 68 - protein, 12 aa, Artificial Sequence
  Description of Artificial Sequence: Synthetic peptide
GSTSESPSGTAP

SEQ ID NO: 69 - protein, 12 aa, Artificial Sequence
  Description of Artificial Sequence: Synthetic peptide
GTSTPESGSASP

SEQ ID NO: 70 - protein, 12 aa, Artificial Sequence
  Description of Artificial Sequence: Synthetic peptide
GTSPSGESSTAP

SEQ ID NO: 71 - protein, 12 aa, Artificial Sequence
  Description of Artificial Sequence: Synthetic peptide
GSTSSTAESPGP

SEQ ID NO: 72 - protein, 12 aa, Artificial Sequence
  Description of Artificial Sequence: Synthetic peptide
GTPGSGTASSSP

SEQ ID NO: 73 - protein, 12 aa, Artificial Sequence
  Description of Artificial Sequence: Synthetic peptide
GSSTPSGATGSP

SEQ ID NO: 74 - protein, 12 aa, Artificial Sequence
  Description of Artificial Sequence: Synthetic peptide
GSSPSASTGTGP

SEQ ID NO: 75 - protein, 12 aa, Artificial Sequence
  Description of Artificial Sequence: Synthetic peptide
GASPGTSSTGSP

SEQ ID NO: 76 - protein, 12 aa, Artificial Sequence
  Description of Artificial Sequence: Synthetic peptide
GEPAGSPTSTSE

SEQ ID NO: 77 - protein, 12 aa, Artificial Sequence
  Description of Artificial Sequence: Synthetic peptide
GTGEPSSTPASE

SEQ ID NO: 78 - protein, 12 aa, Artificial Sequence
  Description of Artificial Sequence: Synthetic peptide
GSGPSTESAPTE

SEQ ID NO: 79 - protein, 12 aa, Artificial Sequence
  Description of Artificial Sequence: Synthetic peptide
GSETPSGPSETA

SEQ ID NO: 80 - protein, 12 aa, Artificial Sequence
  Description of Artificial Sequence: Synthetic peptide
GPSETSTSEPGA

SEQ ID NO: 81 - protein, 12 aa, Artificial Sequence
  Description of Artificial Sequence: Synthetic peptide
GSPSEPTEGTSA

SEQ ID NO: 82 - protein, 12 aa, Artificial Sequence
  Description of Artificial Sequence: Synthetic peptide
GSGASEPTSTEP

SEQ ID NO: 83 - protein, 12 aa, Artificial Sequence
  Description of Artificial Sequence: Synthetic peptide
GSEPATSGTEPS

SEQ ID NO: 84 - protein, 12 aa, Artificial Sequence
  Description of Artificial Sequence: Synthetic peptide
GTSEPSTSEPGA

SEQ ID NO: 85 - protein, 12 aa, Artificial Sequence
  Description of Artificial Sequence: Synthetic peptide
GTSTEPSEPGSA

SEQ ID NO: 86 - protein, 12 aa, Artificial Sequence
  Description of Artificial Sequence: Synthetic peptide
GSTAGSETSTEA

SEQ ID NO: 87 - protein, 12 aa, Artificial Sequence
  Description of Artificial Sequence: Synthetic peptide
GSETATSGSETA

SEQ ID NO: 88 - protein, 12 aa, Artificial Sequence
  Description of Artificial Sequence: Synthetic peptide
GTSESATSESGA

SEQ ID NO: 89 - protein, 12 aa, Artificial Sequence
  Description of Artificial Sequence: Synthetic peptide
GTSTEASEGSAS

SEQ ID NO: 90 - protein, 42 aa, Artificial Sequence
  Description of Artificial Sequence: Synthetic polypeptide
TEPSEGSAPGSPAGSPTSTEEGTSESATPESGPGSEPATSGS

SEQ ID NO: 91 - protein, 42 aa, Artificial Sequence
  Description of Artificial Sequence: Synthetic polypeptide
PAGSPTSTEEGTSTEPSEGSAPGTSESATPESGPGSEPATSG

SEQ ID NO: 92 - protein, 42 aa, Artificial Sequence
  Description of Artificial Sequence: Synthetic polypeptide
SEPATSGSETPGTSESATPESGPGTSTEPSEGSAPGSPAGSP

SEQ ID NO: 93 - protein, 42 aa, Artificial Sequence
  Description of Artificial Sequence: Synthetic polypeptide
GSPGGSPAGSPTSTEEGTSESATPESGPGSEPATSGSETPGT

SEQ ID NO: 94 - protein, 42 aa, Artificial Sequence
  Description of Artificial Sequence: Synthetic polypeptide
GAPGSPAGSPTSTEEGTSESATPESGPGSEPATSGSETPGPA

SEQ ID NO: 95 - protein, 42 aa, Artificial Sequence
  Description of Artificial Sequence: Synthetic polypeptide
GAPSPSASTGTGPGTPGSGTASSSPGSSTPSGATGSPGPSGP

SEQ ID NO: 96 - protein, 42 aa, Artificial Sequence
  Description of Artificial Sequence: Synthetic polypeptide
GPGTPGSGTASSSPGSSTPSGATGSPGSSPSASTGTGPGASP

SEQ ID NO: 97 - protein, 42 aa, Artificial Sequence
  Description of Artificial Sequence: Synthetic polypeptide
SPSASTGTGPGASPGTSSTGSPGTPGSGTASSSPGSSTPSGA

SEQ ID NO: 98 - protein, 42 aa, Artificial Sequence
  Description of Artificial Sequence: Synthetic polypeptide
SASTGTGPGASPGTSSTGSPGTPGSGTASSSPGSSTPSGATG

SEQ ID NO: 99 - protein, 42 aa, Artificial Sequence
  Description of Artificial Sequence: Synthetic polypeptide
GAPGASPGTSSTGSPGSSPSASTGTGPGTPGSGTASSSPGPA

SEQ ID NO: 100 - protein, 42 aa, Artificial Sequence
  Description of Artificial Sequence: Synthetic polypeptide
GSPGGASPGTSSTGSPGSSPSASTGTGPGTPGSGTASSSPTG

SEQ ID NO: 101 - protein, 48 aa, Artificial Sequence
  Description of Artificial Sequence: Synthetic polypeptide
MAEPAGSPTSTEEGTPGSGTASSSPGSSTPSGATGSPGASPGTSSTGS

SEQ ID NO: 102 - protein, 48 aa, Artificial Sequence
  Description of Artificial Sequence: Synthetic polypeptide
MAEPAGSPTSTEEGASPGTSSTGSPGSSTPSGATGSPGSSTPSGATGS

SEQ ID NO: 103 - protein, 144 aa, Artificial Sequence
  Description of Artificial Sequence: Synthetic polypeptide
GSEPATSGSETPGTSESATPESGPGSEPATSGSETPGSPAGSPTSTEEGTSTEPSEGSAPGSEPATSGSETPGSEPATSGSETPGSEPATSGSETPGTSTEPSEGSAPGTSESATPESGPGSEPATSGSETPGTSTEPSEGSAP

SEQ ID NO: 104 - protein, 144 aa, Artificial Sequence
  Description of Artificial Sequence: Synthetic polypeptide
GTSTPESGSASPGTSPSGESSTAPGTSPSGESSTAPGSTSSTAESPGPGSTSESPSGTAPGSTSSTAESPGPGTSPSGESSTAPGTSTPESGSASPGSTSSTAESPGPGTSPSGESSTAPGTSPSGESSTAPGTSPSGESSTAP

SEQ ID NO: 105 - protein, 144 aa, Artificial Sequence
  Description of Artificial Sequence: Synthetic polypeptide
PGSSPSASTGTGPGSSPSASTGTGPGTPGSGTASSSPGSSTPSGATGSPGSSPSASTGTGPGASPGTSSTGSPGTPGSGTASSSPGSSTPSGATGSPGTPGSGTASSSPGASPGTSSTGSPGASPGTSSTGSPGTPGSGTASSS

SEQ ID NO: 106 - protein, 144 aa, Artificial Sequence
  Description of Artificial Sequence: Synthetic polypeptide
SGTASSSPGSSTPSGATGSPGTPGSGTASSSPGSSTPSGATGSPGSSTPSGATGSPGSSPSASTGTGPGSSPSASTGTGPGASPGTSSTGSPGTPGSGTASSSPGSSTPSGATGSPGSSPSASTGTGPGSSPSASTGTGPGASP

SEQ ID NO: 107 - protein, 144 aa, Artificial Sequence
  Description of Artificial Sequence: Synthetic polypeptide
GTPGSGTASSSPGSSTPSGATGSPGSSTPSGATGSPGSSPSASTGTGPGSSPSASTGTGPGASPGTSSTGSPGTPGSGTASSSPGSSTPSGATGSPGSSPSASTGTGPGSSPSASTGTGPGASPGTSSTGSPGASPGTSSTGSP

SEQ ID NO: 108 - protein, 144 aa, Artificial Sequence
  Description of Artificial Sequence: Synthetic polypeptide
GTPGSGTASSSPGSSTPSGATGSPGSSPSASTGTGPGSSPSASTGTGPGASPGTSSTGSPGASPGTSSTGSPGSSTPSGATGSPGSSPSASTGTGPGASPGTSSTGSPGSSPSASTGTGPGTPGSGTASSSPGSSTPSGATGSP

SEQ ID NO: 109 - protein, 288 aa, Artificial Sequence
  Description of Artificial Sequence: Synthetic polypeptide
GTSESATPESGPGSEPATSGSETPGTSESATPESGPGSEPATSGSETPGTSESATPESGPGTSTEPSEGSAPGSPAGSPTSTEEGTSESATPESGPGSEPATSGSETPGTSESATPESGPGSPAGSPTSTEEGSPAGSPTSTEEGTSTEPSEGSAPGTSESATPESGPGTSESATPESGPGTSESATPESGPGSEPATSGSETPGSEPATSGSETPGSPAGSPTSTEEGTSTEPSEGSAPGTSTEPSEGSAPGSEPATSGSETPGTSESATPESGPGTSTEPSEGSAP

SEQ ID NO: 110 - protein, 288 aa, Artificial Sequence
  Description of Artificial Sequence: Synthetic polypeptide
PGASPGTSSTGSPGASPGTSSTGSPGTPGSGTASSSPGSSTPSGATGSPGTPGSGTASSSPGSSTPSGATGSPGTPGSGTASSSPGSSTPSGATGSPGSSTPSGATGSPGSSPSASTGTGPGSSPSASTGTGPGASPGTSSTGSPGTPGSGTASSSPGSSTPSGATGSPGSSPSASTGTGPGSSPSASTGTGPGASPGTSSTGSPGASPGTSSTGSPGSSTPSGATGSPGSSPSASTGTGPGASPGTSSTGSPGSSPSASTGTGPGTPGSGTASSSPGSSTPSGATGS

SEQ ID NO: 111 - protein, 288 aa, Artificial Sequence
  Description of Artificial Sequence: Synthetic polypeptide
GSSPSASTGTGPGSSPSASTGTGPGTPGSGTASSSPGSSTPSGATGSPGSSPSASTGTGPGASPGTSSTGSPGTPGSGTASSSPGSSTPSGATGSPGTPGSGTASSSPGASPGTSSTGSPGASPGTSSTGSPGTPGSGTASSSPGSSTPSGATGSPGASPGTSSTGSPGTPGSGTASSSPGSSTPSGATGSPGSSPSASTGTGPGSSPSASTGTGPGSSTPSGATGSPGSSTPSGATGSPGASPGTSSTGSPGASPGTSSTGSPGASPGTSSTGSPGTPGSGTASSSP

SEQ ID NO: 112 - protein, 504 aa, Artificial Sequence
  Description of Artificial Sequence: Synthetic polypeptide
  MOD_RES (63)..(63): Any amino acid
  MOD_RES (207)..(207): Any amino acid
GASPGTSSTGSPGSSPSASTGTGPGSSPSASTGTGPGTPGSGTASSSPGSSTPSGATGSPGSXPSASTGTGPGASPGTSSTGSPGTPGSGTASSSPGSSTPSGATGSPGTPGSGTASSSPGASPGTSSTGSPGASPGTSSTGSPGTPGSGTASSSPGSSTPSGATGSPGASPGTSSTGSPGTPGSGTASSSPGSSTPSGATGSPGSXPSASTGTGPGSSPSASTGTGPGSSTPSGATGSPGSSTPSGATGSPGASPGTSSTGSPGASPGTSSTGSPGASPGTSSTGSPGTPGSGTASSSPGASPGTSSTGSPGASPGTSSTGSPGASPGTSSTGSPGSSPSASTGTGPGTPGSGTASSSPGASPGTSSTGSPGASPGTSSTGSPGASPGTSSTGSPGSSTPSGATGSPGSSTPSGATGSPGASPGTSSTGSPGTPGSGTASSSPGSSTPSGATGSPGSSTPSGATGSPGSSTPSGATGSPGSSPSASTGTGPGASPGTSSTGSP

SEQ ID NO: 113 - protein, 540 aa, Artificial Sequence
  Description of Artificial Sequence: Synthetic polypeptide
GSTSSTAESPGPGSTSSTAESPGPGSTSESPSGTAPGSTSSTAESPGPGSTSSTAESPGPGTSTPESGSASPGSTSESPSGTAPGTSPSGESSTAPGSTSESPSGTAPGSTSESPSGTAPGTSPSGESSTAPGSTSESPSGTAPGSTSESPSGTAPGTSPSGESSTAPGSTSESPSGTAPGSTSESPSGTAPGSTSESPSGTAPGTSTPESGSASPGSTSESPSGTAPGTSTPESGSASPGSTSSTAESPGPGSTSSTAESPGPGTSTPESGSASPGTSTPESGSASPGSTSESPSGTAPGTSTPESGSASPGTSTPESGSASPGSTSESPSGTAPGSTSESPSGTAPGSTSESPSGTAPGSTSSTAESPGPGTSTPESGSASPGTSTPESGSASPGSTSESPSGTAPGSTSESPSGTAPGTSTPESGSASPGSTSESPSGTAPGSTSESPSGTAPGTSTPESGSASPGTSPSGESSTAPGSTSSTAESPGPGTSPSGESSTAPGSTSSTAESPGPGTSTPESGSASPGSTSESPSGTAP

SEQ ID NO: 114 - protein, 576 aa, Artificial Sequence
  Description of Artificial Sequence: Synthetic polypeptide
GSSESGSSEGGPGSGGEPSESGSSGSSESGSSEGGPGSSESGSSEGGPGSSESGSSEGGPGSSESGSSEGGPGSSESGSSEGGPGESPGGSSGSESGSEGSSGPGESSGSSESGSSEGGPGSSESGSSEGGPGSSESGSSEGGPGSGGEPSESGSSGESPGGSSGSESGESPGGSSGSESGSGGEPSESGSSGSSESGSSEGGPGSGGEPSESGSSGSGGEPSESGSSGSEGSSGPGESSGESPGGSSGSESGSGGEPSESGSSGSGGEPSESGSSGSGGEPSESGSSGSSESGSSEGGPGESPGGSSGSESGESPGGSSGSESGESPGGSSGSESGESPGGSSGSESGESPGGSSGSESGSSESGSSEGGPGSGGEPSESGSSGSEGSSGPGESSGSSESGSSEGGPGSGGEPSESGSSGSSESGSSEGGPGSGGEPSESGSSGESPGGSSGSESGESPGGSSGSESGSSESGSSEGGPGSGGEPSESGSSGSSESGSSEGGPGSGGEPSESGSSGSGGEPSESGSSGESPGGSSGSESGSEGSSGPGESSGSSESGSSEGGPGSEGSSGPGESS

SEQ ID NO: 115 - protein, 576 aa, Artificial Sequence
  Description of Artificial Sequence: Synthetic polypeptide
GSPAGSPTSTEEGTSESATPESGPGTSTEPSEGSAPGSPAGSPTSTEEGTSTEPSEGSAPGTSTEPSEGSAPGTSESATPESGPGSEPATSGSETPGSEPATSGSETPGSPAGSPTSTEEGTSESATPESGPGTSTEPSEGSAPGTSTEPSEGSAPGSPAGSPTSTEEGTSTEPSEGSAPGTSTEPSEGSAPGTSESATPESGPGTSTEPSEGSAPGTSESATPESGPGSEPATSGSETPGTSTEPSEGSAPGTSTEPSEGSAPGTSESATPESGPGTSESATPESGPGSPAGSPTSTEEGTSESATPESGPGSEPATSGSETPGTSESATPESGPGTSTEPSEGSAPGTSTEPSEGSAPGTSTEPSEGSAPGTSTEPSEGSAPGTSTEPSEGSAPGTSTEPSEGSAPGSPAGSPTSTEEGTSTEPSEGSAPGTSESATPESGPGSEPATSGSETPGTSESATPESGPGSEPATSGSETPGTSESATPESGPGTSTEPSEGSAPGTSESATPESGPGSPAGSPTSTEEGSPAGSPTSTEEGSPAGSPTSTEEGTSESATPESGPGTSTEPSEGSAP

SEQ ID NO: 116 - protein, 576 aa, Artificial Sequence
  Description of Artificial Sequence: Synthetic polypeptide
GSTSSTAESPGPGSTSSTAESPGPGSTSESPSGTAPGSTSSTAESPGPGSTSSTAESPGPGTSTPESGSASPGSTSESPSGTAPGTSPSGESSTAPGSTSESPSGTAPGSTSESPSGTAPGTSPSGESSTAPGSTSESPSGTAPGSTSESPSGTAPGTSPSGESSTAPGSTSESPSGTAPGSTSESPSGTAPGSTSESPSGTAPGTSTPESGSASPGSTSESPSGTAPGTSTPESGSASPGSTSSTAESPGPGSTSSTAESPGPGTSTPESGSASPGTSTPESGSASPGSTSESPSGTAPGTSTPESGSASPGTSTPESGSASPGSTSESPSGTAPGSTSESPSGTAPGSTSESPSGTAPGSTSSTAESPGPGTSTPESGSASPGTSTPESGSASPGSTSESPSGTAPGSTSESPSGTAPGTSTPESGSASPGSTSESPSGTAPGSTSESPSGTAPGTSTPESGSASPGTSPSGESSTAPGSTSSTAESPGPGTSPSGESSTAPGSTSSTAESPGPGTSTPESGSASPGSTSESPSGTAPGSTSSTAESPGPGTSTPESGSASPGTSTPESGSASP

SEQ ID NO: 117 - protein, 576 aa, Artificial Sequence
  Description of Artificial Sequence: Synthetic polypeptide
PGTPGSGTASSSPGSSTPSGATGSPGSSPSASTGTGPGSSPSASTGTGPGSSTPSGATGSPGSSTPSGATGSPGASPGTSSTGSPGASPGTSSTGSPGASPGTSSTGSPGTPGSGTASSSPGASPGTSSTGSPGASPGTSSTGSPGASPGTSSTGSPGSSPSASTGTGPGTPGSGTASSSPGASPGTSSTGSPGASPGTSSTGSPGASPGTSSTGSPGSSTPSGATGSPGSSTPSGATGSPGASPGTSSTGSPGTPGSGTASSSPGSSTPSGATGSPGSSTPSGATGSPGSSTPSGATGSPGSSPSASTGTGPGASPGTSSTGSPGASPGTSSTGSPGTPGSGTASSSPGASPGTSSTGSPGASPGTSSTGSPGASPGTSSTGSPGASPGTSSTGSPGTPGSGTASSSPGSSTPSGATGSPGTPGSGTASSSPGSSTPSGATGSPGTPGSGTASSSPGSSTPSGATGSPGSSTPSGATGSPGSSPSASTGTGPGSSPSASTGTGPGASPGTSSTGSPGTPGSGTASSSPGSSTPSGATGSPGSSPSASTGTGPGSSPSASTGTGPGASPGTSSTGS

SEQ ID NO: 118 - protein, 625 aa, Artificial Sequence
  Description of Artificial Sequence: Synthetic polypeptide
MAEPAGSPTSTEEGTPGSGTASSSPGSSTPSGATGSPGASPGTSSTGSPGSPAGSPTSTEEGTSESATPESGPGTSTEPSEGSAPGSPAGSPTSTEEGTSTEPSEGSAPGTSTEPSEGSAPGTSESATPESGPGSEPATSGSETPGSEPATSGSETPGSPAGSPTSTEEGTSESATPESGPGTSTEPSEGSAPGTSTEPSEGSAPGSPAGSPTSTEEGTSTEPSEGSAPGTSTEPSEGSAPGTSESATPESGPGTSTEPSEGSAPGTSESATPESGPGSEPATSGSETPGTSTEPSEGSAPGTSTEPSEGSAPGTSESATPESGPGTSESATPESGPGSPAGSPTSTEEGTSESATPESGPGSEPATSGSETPGTSESATPESGPGTSTEPSEGSAPGTSTEPSEGSAPGTSTEPSEGSAPGTSTEPSEGSAPGTSTEPSEGSAPGTSTEPSEGSAPGSPAGSPTSTEEGTSTEPSEGSAPGTSESATPESGPGSEPATSGSETPGTSESATPESGPGSEPATSGSETPGTSESATPESGPGTSTEPSEGSAPGTSESATPESGPGSPAGSPTSTEEGSPAGSPTSTEEGSPAGSPTSTEEGTSESATPESGPGTSTEPSEGSAP

SEQ ID NO: 119 - protein, 836 aa, Artificial Sequence
  Description of Artificial Sequence: Synthetic polypeptide
GSSESGSSEGGPGSSESGSSEGGPGESPGGSSGSESGSGGEPSESGSSGESPGGSSGSESGESPGGSSGSESGSSESGSSEGGPGSSESGSSEGGPGSSESGSSEGGPGESPGGSSGSESGESPGGSSGSESGESPGGSSGSESGSSESGSSEGGPGSSESGSSEGGPGSSESGSSEGGPGSSESGSSEGGPGSSESGSSEGGPGSSESGSSEGGPGSGGEPSESGSSGESPGGSSGSESGESPGGSSGSESGSGGEPSESGSSGSEGSSGPGESSGSSESGSSEGGPGSGGEPSESGSSGSEGSSGPGESSGSSESGSSEGGPGSGGEPSESGSSGESPGGSSGSESGSGGEPSESGSSGSGGEPSESGSSGSSESGSSEGGPGSGGEPSESGSSGSGGEPSESGSSGSEGSSGPGESSGESPGGSSGSESGSEGSSGPGESSGSEGSSGPGESSGSGGEPSESGSSGSSESGSSEGGPGSSESGSSEGGPGESPGGSSGSESGSGGEPSESGSSGSEGSSGPGESSGESPGGSSGSESGSEGSSGPGSSESGSSEGGPGSGGEPSESGSSGSEGSSGPGESSGSEGSSGPGESSGSEGSSGPGESSGSGGEPSESGSSGSGGEPSESGSSGESPGGSSGSESGESPGGSSGSESGSGGEPSESGSSGSEGSSGPGESSGESPGGSSGSESGSSESGSSEGGPGSSESGSSEGGPGSSESGSSEGGPGSGGEPSESGSSGSSESGSSEGGPGESPGGSSGSESGSGGEPSESGSSGSSESGSSEGGPGESPGGSSGSESGSGGEPSESGSSGESPGGSSGSESGSGGEPSESGSS

SEQ ID NO: 120 - protein, 864 aa, Artificial Sequence
  Description of Artificial Sequence: Synthetic polypeptide
GSPAGSPTSTEEGTSESATPESGPGTSTEPSEGSAPGSPAGSPTSTEEGTSTEPSEGSAPGTSTEPSEGSAPGTSESATPESGPGSEPATSGSETPGSEPATSGSETPGSPAGSPTSTEEGTSESATPESGPGTSTEPSEGSAPGTSTEPSEGSAPGSPAGSPTSTEEGTSTEPSEGSAPGTSTEPSEGSAPGTSESATPESGPGTSTEPSEGSAPGTSESATPESGPGSEPATSGSETPGTSTEPSEGSAPGTSTEPSEGSAPGTSESATPESGPGTSESATPESGPGSPAGSPTSTEEGTSESATPESGPGSEPATSGSETPGTSESATPESGPGTSTEPSEGSAPGTSTEPSEGSAPGTSTEPSEGSAPGTSTEPSEGSAPGTSTEPSEGSAPGTSTEPSEGSAPGSPAGSPTSTEEGTSTEPSEGSAPGTSESATPESGPGSEPATSGSETPGTSESATPESGPGSEPATSGSETPGTSESATPESGPGTSTEPSEGSAPGTSESATPESGPGSPAGSPTSTEEGSPAGSPTSTEEGSPAGSPTSTEEGTSESATPESGPGTSTEPSEGSAPGTSESATPESGPGSEPATSGSETPGTSESATPESGPGSEPATSGSETPGTSESATPESGPGTSTEPSEGSAPGSPAGSPTSTEEGTSESATPESGPGSEPATSGSETPGTSESATPESGPGSPAGSPTSTEEGSPAGSPTSTEEGTSTEPSEGSAPGTSESATPESGPGTSESATPESGPGTSESATPESGPGSEPATSGSETPGSEPATSGSETPGSPAGSPTSTEEGTSTEPSEGSAPGTSTEPSEGSAPGSEPATSGSETPGTSESATPESGPGTSTEPSEGSAP

SEQ ID NO: 121 - protein, 875 aa, Artificial Sequence
  Description of Artificial Sequence: Synthetic polypeptide
  MOD_RES (430)..(432): Any amino acid
  MOD_RES (443)..(446): Any amino acid
GSTSESPSGTAPGTSPSGESSTAPGSTSESPSGTAPGSTSESPSGTAPGTSTPESGSASPGTSTPESGSASPGSTSESPSGTAPGSTSESPSGTAPGTSPSGESSTAPGSTSESPSGTAPGTSPSGESSTAPGTSPSGESSTAPGSTSSTAESPGPGTSPSGESSTAPGTSPSGESSTAPGSTSSTAESPGPGTSTPESGSASPGTSTPESGSASPGSTSESPSGTAPGSTSESPSGTAPGTSTPESGSASPGSTSSTAESPGPGTSTPESGSASPGSTSESPSGTAPGTSPSGESSTAPGSTSSTAESPGPGTSPSGESSTAPGTSTPESGSASPGSTSSTAESPGPGSTSSTAESPGPGSTSSTAESPGPGSTSSTAESPGPGTSPSGESSTAPGSTSESPSGTAPGSTSESPSGTAPGTSTPESGPXXXGASASGAPSTXXXXSESPSGTAPGSTSESPSGTAPGSTSESPSGTAPGSTSESPSGTAPGSTSESPSGTAPGSTSESPSGTAPGTSTPESGSASPGTSPSGESSTAPGTSPSGESSTAPGSTSSTAESPGPGTSPSGESSTAPGTSTPESGSASPGSTSESPSGTAPGSTSESPSGTAPGTSPSGESSTAPGSTSESPSGTAPGTSTPESGSASPGTSTPESGSASPGSTSESPSGTAPGTSTPESGSASPGSTSSTAESPGPGSTSESPSGTAPGSTSESPSGTAPGTSPSGESSTAPGSTSSTAESPGPGTSPSGESSTAPGTSTPESGSASPGTSPSGESSTAPGTSPSGESSTAPGTSPSGESSTAPGSTSSTAESPGPGSTSSTAESPGPGTSPSGESSTAPGSSPSASTGTGPGSSTPSGATGSPGSSTPSGATGSP

SEQ ID NO: 122 - protein, 864 aa, Artificial Sequence
  Description of Artificial Sequence: Synthetic polypeptide
GASPGTSSTGSPGSSPSASTGTGPGSSPSASTGTGPGTPGSGTASSSPGSSTPSGATGSPGSSPSASTGTGPGASPGTSSTGSPGTPGSGTASSSPGSSTPSGATGSPGTPGSGTASSSPGASPGTSSTGSPGASPGTSSTGSPGTPGSGTASSSPGSSTPSGATGSPGASPGTSSTGSPGTPGSGTASSSPGSSTPSGATGSPGSSPSASTGTGPGSSPSASTGTGPGSSTPSGATGSPGSSTPSGATGSPGASPGTSSTGSPGASPGTSSTGSPGASPGTSSTGSPGTPGSGTASSSPGASPGTSSTGSPGASPGTSSTGSPGASPGTSSTGSPGSSPSASTGTGPGTPGSGTASSSPGASPGTSSTGSPGASPGTSSTGSPGASPGTSSTGSPGSSTPSGATGSPGSSTPSGATGSPGASPGTSSTGSPGTPGSGTASSSPGSSTPSGATGSPGSSTPSGATGSPGSSTPSGATGSPGSSPSASTGTGPGASPGTSSTGSPGASPGTSSTGSPGTPGSGTASSSPGASPGTSSTGSPGASPGTSSTGSPGASPGTSSTGSPGASPGTSSTGSPGTPGSGTASSSPGSSTPSGATGSPGTPGSGTASSSPGSSTPSGATGSPGTPGSGTASSSPGSSTPSGATGSPGSSTPSGATGSPGSSPSASTGTGPGSSPSASTGTGPGASPGTSSTGSPGTPGSGTASSSPGSSTPSGATGSPGSSPSASTGTGPGSSPSASTGTGPGASPGTSSTGSPGASPGTSSTGSPGSSTPSGATGSPGSSPSASTGTGPGASPGTSSTGSPGSSPSASTGTGPGTPGSGTASSSPGSSTPSGATGSPGSSTPSGATGSPGASPGTSSTGSP

SEQ ID NO: 123 - protein, 875 aa, Artificial Sequence
  Description of Artificial Sequence: Synthetic polypeptide
GTSTEPSEGSAPGSEPATSGSETPGSPAGSPTSTEEGSTSSTAESPGPGTSTPESGSASPGSTSESPSGTAPGSTSESPSGTAPGTSTPESGSASPGTSTPESGSASPGSEPATSGSETPGTSESATPESGPGSPAGSPTSTEEGTSTEPSEGSAPGTSESATPESGPGTSTEPSEGSAPGTSTEPSEGSAPGSPAGSPTSTEEGTSTEPSEGSAPGTSTEPSEGSAPGTSESATPESGPGTSESATPESGPGTSTEPSEGSAPGTSTEPSEGSAPGTSESATPESGPGTSTEPSEGSAPGSEPATSGSETPGSPAGSPTSTEEGSSTPSGATGSPGTPGSGTASSSPGSSTPSGATGSPGTSTEPSEGSAPGTSTEPSEGSAPGSEPATSGSETPGSPAGSPTSTEEGSPAGSPTSTEEGTSTEPSEGSAPGASASGAPSTGGTSESATPESGPGSPAGSPTSTEEGSPAGSPTSTEEGSTSSTAESPGPGSTSESPSGTAPGTSPSGESSTAPGTPGSGTASSSPGSSTPSGATGSPGSSPSASTGTGPGSEPATSGSETPGTSESATPESGPGSEPATSGSETPGSTSSTAESPGPGSTSSTAESPGPGTSPSGESSTAPGSEPATSGSETPGSEPATSGSETPGTSTEPSEGSAPGSTSSTAESPGPGTSTPESGSASPGSTSESPSGTAPGTSTEPSEGSAPGTSTEPSEGSAPGTSTEPSEGSAPGSSTPSGATGSPGSSPSASTGTGPGASPGTSSTGSPGSEPATSGSETPGTSESATPESGPGSPAGSPTSTEEGSSTPSGATGSPGSSPSASTGTGPGASPGTSSTGSPGTSESATPESGPGTSTEPSEGSAPGTSTEPSEGSAP

SEQ ID NO: 124 - protein, 913 aa, Artificial Sequence
  Description of Artificial Sequence: Synthetic polypeptide
MAEPAGSPTSTEEGTPGSGTASSSPGSSTPSGATGSPGASPGTSSTGSPGSPAGSPTSTEEGTSESATPESGPGTSTEPSEGSAPGSPAGSPTSTEEGTSTEPSEGSAPGTSTEPSEGSAPGTSESATPESGPGSEPATSGSETPGSEPATSGSETPGSPAGSPTSTEEGTSESATPESGPGTSTEPSEGSAPGTSTEPSEGSAPGSPAGSPTSTEEGTSTEPSEGSAPGTSTEPSEGSAPGTSESATPESGPGTSTEPSEGSAPGTSESATPESGPGSEPATSGSETPGTSTEPSEGSAPGTSTEPSEGSAPGTSESATPESGPGTSESATPESGPGSPAGSPTSTEEGTSESATPESGPGSEPATSGSETPGTSESATPESGPGTSTEPSEGSAPGTSTEPSEGSAPGTSTEPSEGSAPGTSTEPSEGSAPGTSTEPSEGSAPGTSTEPSEGSAPGSPAGSPTSTEEGTSTEPSEGSAPGTSESATPESGPGSEPATSGSETPGTSESATPESGPGSEPATSGSETPGTSESATPESGPGTSTEPSEGSAPGTSESATPESGPGSPAGSPTSTEEGSPAGSPTSTEEGSPAGSPTSTEEGTSESATPESGPGTSTEPSEGSAPGTSESATPESGPGSEPATSGSETPGTSESATPESGPGSEPATSGSETPGTSESATPESGPGTSTEPSEGSAPGSPAGSPTSTEEGTSESATPESGPGSEPATSGSETPGTSESATPESGPGSPAGSPTSTEEGSPAGSPTSTEEGTSTEPSEGSAPGTSESATPESGPGTSESATPESGPGTSESATPESGPGSEPATSGSETPGSEPATSGSETPGSPAGSPTSTEEGTSTEPSEGSAPGTSTEPSEGSAPGSEPATSGSETPGTSESATPESGPGTSTEPSEGSAP

SEQ ID NO: 125 - protein, 924 aa, Artificial Sequence
  Description of Artificial Sequence: Synthetic polypeptide
MAEPAGSPTSTEEGASPGTSSTGSPGSSTPSGATGSPGSSTPSGATGSPGTSTEPSEGSAPGSEPATSGSETPGSPAGSPTSTEEGSTSSTAESPGPGTSTPESGSASPGSTSESPSGTAPGSTSESPSGTAPGTSTPESGSASPGTSTPESGSASPGSEPATSGSETPGTSESATPESGPGSPAGSPTSTEEGTSTEPSEGSAPGTSESATPESGPGTSTEPSEGSAPGTSTEPSEGSAPGSPAGSPTSTEEGTSTEPSEGSAPGTSTEPSEGSAPGTSESATPESGPGTSESATPESGPGTSTEPSEGSAPGTSTEPSEGSAPGTSESATPESGPGTSTEPSEGSAPGSEPATSGSETPGSPAGSPTSTEEGSSTPSGATGSPGTPGSGTASSSPGSSTPSGATGSPGTSTEPSEGSAPGTSTEPSEGSAPGSEPATSGSETPGSPAGSPTSTEEGSPAGSPTSTEEGTSTEPSEGSAPGASASGAPSTGGTSESATPESGPGSPAGSPTSTEEGSPAGSPTSTEEGSTSSTAESPGPGSTSESPSGTAPGTSPSGESSTAPGTPGSGTASSSPGSSTPSGATGSPGSSPSASTGTGPGSEPATSGSETPGTSESATPESGPGSEPATSGSETPGSTSSTAESPGPGSTSSTAESPGPGTSPSGESSTAPGSEPATSGSETPGSEPATSGSETPGTSTEPSEGSAPGSTSSTAESPGPGTSTPESGSASPGSTSESPSGTAPGTSTEPSEGSAPGTSTEPSEGSAPGTSTEPSEGSAPGSSTPSGATGSPGSSPSASTGTGPGASPGTSSTGSPGSEPATSGSETPGTSESATPESGPGSPAGSPTSTEEGSSTPSGATGSPGSSPSASTGTGPGASPGTSSTGSPGTSESATPESGPGTSTEPSEGSAPGTSTEPSEGSAP

SEQ ID NO: 126 - protein, 1318 aa, Artificial Sequence
  Description of Artificial Sequence: Synthetic polypeptide
GTSTEPSEGSAPGSEPATSGSETPGSPAGSPTSTEEGSTSSTAESPGPGTSTPESGSASPGSTSESPSGTAPGSTSESPSGTAPGTSTPESGSASPGTSTPESGSASPGSEPATSGSETPGTSESATPESGPGSPAGSPTSTEEGTSTEPSEGSAPGTSESATPESGPGTSTEPSEGSAPGTSTEPSEGSAPGSPAGSPTSTEEGTSTEPSEGSAPGTSTEPSEGSAPGTSESATPESGPGTSESATPESGPGTSTEPSEGSAPGTSTEPSEGSAPGTSESATPESGPGTSTEPSEGSAPGSEPATSGSETPGSPAGSPTSTEEGSSTPSGATGSPGTPGSGTASSSPGSSTPSGATGSPGTSTEPSEGSAPGTSTEPSEGSAPGSEPATSGSETPGSPAGSPTSTEEGSPAGSPTSTEEGTSTEPSEGSAPGPEPTGPAPSGGSEPATSGSETPGTSESATPESGPGSPAGSPTSTEEGTSESATPESGPGSPAGSPTSTEEGSPAGSPTSTEEGTSESATPESGPGSPAGSPTSTEEGSPAGSPTSTEEGSTSSTAESPGPGSTSESPSGTAPGTSPSGESSTAPGSTSESPSGTAPGSTSESPSGTAPGTSPSGESSTAPGTSTEPSEGSAPGTSESATPESGPGTSESATPESGPGSEPATSGSETPGTSESATPESGPGTSESATPESGPGTSTEPSEGSAPGTSESATPESGPGTSTEPSEGSAPGTSPSGESSTAPGTSPSGESSTAPGTSPSGESSTAPGTSTEPSEGSAPGSPAGSPTSTEEGTSTEPSEGSAPGSSPSASTGTGPGSSTPSGATGSPGSSTPSGATGSPGSSTPSGATGSPGSSTPSGATGSPGASPGTSSTGSPGASASGAPSTGGTSPSGESSTAPGSTSSTAESPGPGTSPSGESSTAPGTSESATPESGPGTSTEPSEGSAPGTSTEPSEGSAPGSSPSASTGTGPGSSTPSGATGSPGASPGTSSTGSPGTSTPESGSASPGTSPSGESSTAPGTSPSGESSTAPGTSESATPESGPGSEPATSGSETPGTSTEPSEGSAPGSTSESPSGTAPGSTSESPSGTAPGTSTPESGSASPGSPAGSPTSTEEGTSESATPESGPGTSTEPSEGSAPGSPAGSPTSTEEGTSESATPESGPGSEPATSGSETPGSSTPSGATGSPGASPGTSSTGSPGSSTPSGATGSPGSTSESPSGTAPGTSPSGESSTAPGSTSSTAESPGPGSSTPSGATGSPGASPGTSSTGSPGTPGSGTASSSPGSPAGSPTSTEEGSPAGSPTSTEEGTSTEPSEGSAP

SEQ ID NO: 127 - protein, 864 aa, Artificial Sequence
  Description of Artificial Sequence: Synthetic polypeptide
GTSTEPSEPGSAGTSTEPSEPGSAGSEPATSGTEPSGSGASEPTSTEPGSEPATSGTEPSGSEPATSGTEPSGSEPATSGTEPSGSGASEPTSTEPGTSTEPSEPGSAGSEPATSGTEPSGTSTEPSEPGSAGSEPATSGTEPSGSEPATSGTEPSGTSTEPSEPGSAGTSTEPSEPGSAGSEPATSGTEPSGSEPATSGTEPSGTSEPSTSEPGAGSGASEPTSTEPGTSEPSTSEPGAGSEPATSGTEPSGSEPATSGTEPSGTSTEPSEPGSAGTSTEPSEPGSAGSGASEPTSTEPGSEPATSGTEPSGSEPATSGTEPSGSEPATSGTEPSGSEPATSGTEPSGTSTEPSEPGSAGSEPATSGTEPSGSGASEPTSTEPGTSTEPSEPGSAGSEPATSGTEPSGSGASEPTSTEPGTSTEPSEPGSAGSGASEPTSTEPGSEPATSGTEPSGSGASEPTSTEPGSEPATSGTEPSGSGASEPTSTEPGTSTEPSEPGSAGSEPATSGTEPSGSGASEPTSTEPGTSTEPSEPGSAGSEPATSGTEPSGTSTEPSEPGSAGSEPATSGTEPSGTSTEPSEPGSAGTSTEPSEPGSAGTSTEPSEPGSAGTSTEPSEPGSAGTSTEPSEPGSAGTSTEPSEPGSAGTSEPSTSEPGAGSGASEPTSTEPGTSTEPSEPGSAGTSTEPSEPGSAGTSTEPSEPGSAGSEPATSGTEPSGSGASEPTSTEPGSEPATSGTEPSGSEPATSGTEPSGSEPATSGTEPSGSEPATSGTEPSGTSEPSTSEPGAGSEPATSGTEPSGSGASEPTSTEPGTSTEPSEPGSAGSEPATSGTEPSGSGASEPTSTEPGTSTEPSEPGSA

SEQ ID NO: 128 - protein, 864 aa, Artificial Sequence
  Description of Artificial Sequence: Synthetic polypeptide
GSETATSGSETAGTSESATSESGAGSTAGSETSTEAGTSESATSESGAGSETATSGSETAGSETATSGSETAGTSTEASEGSASGTSTEASEGSASGTSESATSESGAGSETATSGSETAGTSTEASEGSASGSTAGSETSTEAGTSESATSESGAGTSESATSESGAGSETATSGSETAGTSESATSESGAGTSTEASEGSASGSETATSGSETAGSETATSGSETAGTSTEASEGSASGSTAGSETSTEAGTSESATSESGAGTSTEASEGSASGSETATSGSETAGSTAGSETSTEAGSTAGSETSTEAGSETATSGSETAGTSESATSESGAGTSESATSESGAGSETATSGSETAGTSESATSESGAGTSESATSESGAGSETATSGSETAGSETATSGSETAGTSTEASEGSASGSTAGSETSTEAGSETATSGSETAGTSESATSESGAGSTAGSETSTEAGSTAGSETSTEAGSTAGSETSTEAGTSTEASEGSASGSTAGSETSTEAGSTAGSETSTEAGTSTEASEGSASGSTAGSETSTEAGSETATSGSETAGTSTEASEGSASGTSESATSESGAGSETATSGSETAGTSESATSESGAGTSESATSESGAGSETATSGSETAGTSESATSESGAGSETATSGSETAGTSTEASEGSASGTSTEASEGSASGSTAGSETSTEAGSTAGSETSTEAGSETATSGSETAGTSESATSESGAGTSESATSESGAGSETATSGSETAGSETATSGSETAGSETATSGSETAGTSTEASEGSASGTSESATSESGAGSETATSGSETAGSETATSGSETAGTSESATSESGAGTSESATSESGAGSETATSGSETA

SEQ ID NO: 129 - protein, 288 aa, Artificial Sequence
  Description of Artificial Sequence: Synthetic polypeptide
GEGSGEGSEGEGSEGSGEGEGSEGSGEGEGGSEGSEGEGGSEGSEGEGGSEGSEGEGSGEGSEGEGGSEGSEGEGSGEGSEGEGSEGGSEGEGGSEGSEGEGSGEGSEGEGGEGGSEGEGSEGSGEGEGSGEGSEGEGSEGSGEGEGSGEGSEGEGSEGSGEGEGSEGSGEGEGGSEGSEGEGSEGSGEGEGGEGSGEGEGSGEGSEGEGGGEGSEGEGSGEGGEGEGSEGGSEGEGGSEGGEGEGSEGSGEGEGSEGGSEGEGSEGGSEGEGSEGSGEGEGSEGSGE

SEQ ID NO: 130 - protein, 576 aa, Artificial Sequence
  Description of Artificial Sequence: Synthetic polypeptide
GEGSGEGSEGEGSEGSGEGEGSEGSGEGEGGSEGSEGEGSEGSGEGEGGEGSGEGEGSGEGSEGEGGGEGSEGEGSGEGGEGEGSEGGSEGEGGSEGGEGEGSEGSGEGEGSEGGSEGEGSEGGSEGEGSEGSGEGEGSEGSGEGEGSEGSGEGEGSEGSGEGEGSEGGSEGEGGSEGSEGEGSGEGSEGEGGSEGSEGEGGGEGSEGEGSGEGSEGEGGSEGSEGEGGSEGSEGEGGEGSGEGEGSEGSGEGEGSGEGSEGEGSEGSGEGEGSEGSGEGEGGSEGSEGEGSGEGSEGEGSEGSGEGEGSEGSGEGEGGSEGSEGEGGSEGSEGEGGSEGSEGEGGEGSGEGEGSEGSGEGEGSGEGSEGEGSEGSGEGEGSEGSGEGEGGSEGSEGEGSEGSGEGEGGEGSGEGEGSGEGSEGEGGGEGSEGEGSEGSGEGEGSEGSGEGEGSEGGSEGEGGSEGSEGEGSEGGSEGEGSEGGSEGEGSEGSGEGEGSEGSGEGEGSGEGSEGEGGSEGGEGEGSEGGSEGEGSEGGSEGEGGEGSGEGEGGGEGSEGEGSEGSGEGEGSGEGSE

SEQ ID NO: 131 - protein, 48 aa, Artificial Sequence; identical to SEQ ID NO: 101
  Description of Artificial Sequence: Synthetic polypeptide

SEQ ID NO: 132 - protein, 48 aa, Artificial Sequence; identical to SEQ ID NO: 102
  Description of Artificial Sequence: Synthetic polypeptide

SEQ ID NO: 133 - protein, 4 aa, Artificial Sequence
  Description of Artificial Sequence: Synthetic peptide
GSPG

SEQ ID NO: 134 - protein, 4 aa, Artificial Sequence
  Description of Artificial Sequence: Synthetic peptide
ETET

SEQ ID NO: 135 - protein, 5 aa, Artificial Sequence
  Description of Artificial Sequence: Synthetic peptide
PGSSS

SEQ ID NO: 136 - protein, 5 aa, Artificial Sequence
  Description of Artificial Sequence: Synthetic peptide
GPSGP

SEQ ID NO: 137 - protein, 7 aa, Artificial Sequence
  Description of Artificial Sequence: Synthetic peptide
KLTRAET

SEQ ID NO: 138 - protein, 7 aa, Artificial Sequence
  Description of Artificial Sequence: Synthetic peptide
DFTRVVG

SEQ ID NO: 139 - protein, 8 aa, Artificial Sequence
  Description of Artificial Sequence: Synthetic peptide
TMTRIVGG

SEQ ID NO: 140 - protein, 8 aa, Artificial Sequence
  Description of Artificial Sequence: Synthetic peptide
SPFRSTGG

SEQ ID NO: 141 - protein, 8 aa, Artificial Sequence
  Description of Artificial Sequence: Synthetic peptide
LQVRIVGG

SEQ ID NO: 142 - protein, 8 aa, Artificial Sequence
  Description of Artificial Sequence: Synthetic peptide
PLGRIVGG

SEQ ID NO: 143 - protein, 8 aa, Artificial Sequence
  Description of Artificial Sequence: Synthetic peptide
IEGRTVGG

SEQ ID NO: 144 - protein, 8 aa, Artificial Sequence
  Description of Artificial Sequence: Synthetic peptide
LTPRSLLV

SEQ ID NO: 145 - protein, 8 aa, Artificial Sequence
  Description of Artificial Sequence: Synthetic peptide
LGPVSGVP

SEQ ID NO: 146 - protein, 8 aa, Artificial Sequence
  Description of Artificial Sequence: Synthetic peptide
VAGDSLEE

SEQ ID NO: 147 - protein, 8 aa, Artificial Sequence
  Description of Artificial Sequence: Synthetic peptide
GPAGLGGA

SEQ ID NO: 148 - protein, 8 aa, Artificial Sequence
  Description of Artificial Sequence: Synthetic peptide
  MOD_RES (2)..(2): Pro or Ala
  MOD_RES (3)..(3): Any amino acid
  MOD_RES (6)..(6): Any amino acid
  MOD_RES (8)..(8): Any amino acid
GXXGLXGX

SEQ ID NO: 149 - protein, 8 aa, Artificial Sequence
  Description of Artificial Sequence: Synthetic peptide
GPAGLRGA

SEQ ID NO: 150 - protein, 8 aa, Artificial Sequence
  Description of Artificial Sequence: Synthetic peptide
  MOD_RES (3)..(3): Any amino acid
  MOD_RES (6)..(6): Any amino acid
  MOD_RES (7)..(7): Gly or Ala
  MOD_RES (8)..(8): Any amino acid
GPXGLXXX

SEQ ID NO: 151 - protein, 8 aa, Artificial Sequence
  Description of Artificial Sequence: Synthetic peptide
APLGLRLR

SEQ ID NO: 152 - protein, 8 aa, Artificial Sequence
  Description of Artificial Sequence: Synthetic peptide
PALPLVAQ

SEQ ID NO: 153 - protein, 7 aa, Artificial Sequence
  Description of Artificial Sequence: Synthetic peptide
ENLYFQG

SEQ ID NO: 154 - protein, 8 aa, Artificial Sequence
  Description of Artificial Sequence: Synthetic peptide
ENLYFQGS

SEQ ID NO: 155 - protein, 8 aa, Artificial Sequence
  Description of Artificial Sequence: Synthetic peptide
DDDKIVGG

SEQ ID NO: 156 - protein, 8 aa, Artificial Sequence
  Description of Artificial Sequence: Synthetic peptide
DDDKIVGG

SEQ ID NO: 157 - protein, 8 aa, Artificial Sequence
  Description of Artificial Sequence: Synthetic peptide
LEVLFQGP

SEQ ID NO: 158 - protein, 8 aa, Artificial Sequence
  Description of Artificial Sequence: Synthetic peptide
LEVLFQGP

SEQ ID NO: 159 - protein, 8 aa, Artificial Sequence
  Description of Artificial Sequence: Synthetic peptide
LPKTGSES

SEQ ID NO: 160 - protein, 8 aa, Artificial Sequence
  Description of Artificial Sequence: Synthetic peptide
  MOD_RES (3)..(3): Lys, Glu, Ala or Asp
  MOD_RES (6)..(6): Any amino acid
  MOD_RES (7)..(7): Glu, Lys or Ser
LPXTGXXS

SEQ ID NO: 161 - DNA, 432 bp, Artificial Sequence
  Description of Artificial Sequence: Synthetic polynucleotide
ggtagcgaaccggcaacttccggctctgaaaccccaggtacttctgaaagcgctactcctgagtctggcccaggtagcgaacctgctacctctggctctgaaaccccaggtagcccggcaggctctccgacttccaccgaggaaggtacctctactgaaccttctgagggtagcgctccaggtagcgaaccggcaacctctggctctgaaaccccaggtagcgaacctgctacctccggctctgaaactccaggtagcgaaccggctacttccggttctgaaactccaggtacctctaccgaaccttccgaaggcagcgcaccaggtacttctgaaagcgcaacccctgaatccggtccaggtagcgaaccggctacttctggctctgagactccaggtacttctaccgaaccgtccgaaggtagcgcacca

SEQ ID NO: 162 - DNA, 432 bp, Artificial Sequence
  Description of Artificial Sequence: Synthetic polynucleotide
ggtacttctactccggaaagcggttccgcatctccaggtacttctcctagcggtgaatcttctactgctccaggtacctctcctagcggcgaatcttctactgctccaggttctaccagctctaccgctgaatctcctggcccaggttctaccagcgaatccccgtctggcaccgcaccaggttctactagctctaccgcagaatctccgggtccaggtacttcccctagcggtgaatcttctactgctccaggtacctctactccggaaagcggctccgcatctccaggttctactagctctactgctgaatctcctggtccaggtacctcccctagcggcgaatcttctactgctccaggtacctctcctagcggcgaatcttctaccgctccaggtacctcccctagcggtgaatcttctaccgcacca

SEQ ID NO: 163 - DNA, 864 bp, Artificial Sequence
  Description of Artificial Sequence: Synthetic polynucleotide
ggtacctctgaaagcgcaactcctgagtctggcccaggtagcgaacctgctacctccggctctgagactccaggtacctctgaaagcgcaaccccggaatctggtccaggtagcgaacctgcaacctctggctctgaaaccccaggtacctctgaaagcgctactcctgaatctggcccaggtacttctactgaaccgtccgagggcagcgcaccaggtagccctgctggctctccaacctccaccgaagaaggtacctctgaaagcgcaacccctgaatccggcccaggtagcgaaccggcaacctccggttctgaaaccccaggtacttctgaaagcgctactcctgagtccggcccaggtagcccggctggctctccgacttccaccgaggaaggtagcccggctggctctccaacttctactgaagaaggtacttctaccgaaccttccgagggcagcgcaccaggtacttctgaaagcgctacccctgagtccggcccaggtacttctgaaagcgctactcctgaatccggtccaggtacttctgaaagcgctaccccggaatctggcccaggtagcgaaccggctacttctggttctgaaaccccaggtagcgaaccggctacctccggttctgaaactccaggtagcccagcaggctctccgacttccactgaggaaggtacttctactgaaccttccgaaggcagcgcaccaggtacctctactgaaccttctgagggcagcgctccaggtagcgaacctgcaacctctggctctgaaaccccaggtacctctgaaagcgctactcctgaatctggcccaggtacttctactgaaccgtccgagggcagcgcacca

SEQ ID NO: 164 - DNA, 1728 bp, Artificial Sequence
  Description of Artificial Sequence: Synthetic polynucleotide
ggtagcccggctggctctcctacctctactgaggaaggtacttctgaaagcgctactcctgagtctggtccaggtacctctactgaaccgtccgaaggtagcgctccaggtagcccagcaggctctccgacttccactgaggaaggtacttctactgaaccttccgaaggcagcgcaccaggtacctctactgaaccttctgagggcagcgctccaggtacttctgaaagcgctaccccggaatctggcccaggtagcgaaccggctacttctggttctgaaaccccaggtagcgaaccggctacctccggttctgaaactccaggtagcccggcaggctctccgacctctactgaggaaggtacttctgaaagcgcaaccccggagtccggcccaggtacctctaccgaaccgtctgagggcagcgcaccaggtacttctaccgaaccgtccgagggtagcgcaccaggtagcccagcaggttctcctacctccaccgaggaaggtacttctaccgaaccgtccgagggtagcgcaccaggtacctctactgaaccttctgagggcagcgctccaggtacttctgaaagcgctaccccggagtccggtccaggtacttctactgaaccgtccgaaggtagcgcaccaggtacttctgaaagcgcaacccctgaatccggtccaggtagcgaaccggctacttctggctctgagactccaggtacttctaccgaaccgtccgaaggtagcgcaccaggtacttctactgaaccgtctgaaggtagcgcaccaggtacttctgaaagcgcaaccccggaatccggcccaggtacctctgaaagcgcaaccccggagtccggcccaggtagccctgctggctctccaacctccaccgaagaaggtacctctgaaagcgcaacccctgaatccggcccaggtagcgaaccggcaacctccggttctgaaaccccaggtacctctgaaagcgctactccggagtctggcccaggtacctctactgaaccgtctgagggtagcgctccaggtacttctactgaaccgtccgaaggtagcgcaccaggtacttctaccgaaccgtccgaaggcagcgctccaggtacctctactgaaccttccgagggcagcgctccaggtacctctaccgaaccttctgaaggtagcgcaccaggtacttctaccgaaccgtccgagggtagcgcaccaggtagcccagcaggttctcctacctccaccgaggaaggtacttctaccgaaccgtccgagggtagcgcaccaggtacctctgaaagcgcaactcctgagtctggcccaggtagcgaacctgctacctccggctctgagactccaggtacctctgaaagcgcaaccccggaatctggtccaggtagcgaacctgcaacctctggctctgaaaccccaggtacctctgaaagcgctactcctgaatctggcccaggtacttctactgaaccgtccgagggcagcgcaccaggtacttctgaaagcgctactcctgagtccggcccaggtagcccggctggctctccgacttccaccgaggaaggtagcccggctggctctccaacttctactgaagaaggtagcccggcaggctctccgacctctactgaggaaggtacttctgaaagcgcaaccccggagtccggcccaggtacctctaccgaaccgtctgagggcagcgcacca

SEQ ID NO: 165 - DNA, 1728 bp, Artificial Sequence
  Description of Artificial Sequence: Synthetic polynucleotide
ggttctactagctctaccgctgaatctcctggcccaggttccactagctctaccgcagaatctccgggcccaggttctactagcgaatccccttctggtaccgctccaggttctactagctctaccgctgaatctccgggtccaggttctaccagctctactgcagaatctcctggcccaggtacttctactccggaaagcggttccgcttctccaggttctaccagcgaatctccttctggcaccgctccaggtacctctcctagcggcgaatcttctaccgctccaggttctactagcgaatctccttctggcactgcaccaggttctaccagcgaatctccttctggcaccgctccaggtacctctcctagcggcgaatcttctaccgctccaggttctactagcgaatctccttctggcactgcaccaggttctaccagcgaatctccttctggcaccgctccaggtacctctcctagcggcgaatcttctaccgctccaggttctactagcgaatctccttctggcactgcaccaggttctactagcgaatctccttctggcactgcaccaggttctaccagcgaatctccgtctggcactgcaccaggtacctctacccctgaaagcggttccgcttctccaggttctactagcgaatctccttctggtaccgctccaggtacttctacccctgaaagcggctccgcttctccaggttccactagctctaccgctgaatctccgggtccaggttctactagctctactgcagaatctcctggcccaggtacctctactccggaaagcggctctgcatctccaggtacttctacccctgaaagcggttctgcatctccaggttctactagcgaatccccgtctggtaccgcaccaggtacttctaccccggaaagcggctctgcttctccaggtacttctaccccggaaagcggctccgcatctccaggttctactagcgaatctccttctggtaccgctccaggttctaccagcgaatccccgtctggtactgctccaggttctaccagcgaatctccttctggtactgcaccaggttctactagctctactgcagaatctcctggcccaggtacctctactccggaaagcggctctgcatctccaggtacttctacccctgaaagcggttctgcatctccaggttctactagcgaatctccttctggcactgcaccaggttctaccagcgaatctccgtctggcactgcaccaggtacctctacccctgaaagcggttccgcttctccaggttctactagcgaatctccttctggcactgcaccaggttctaccagcgaatctccgtctggcactgcaccaggtacctctacccctgaaagcggttccgcttctccaggtacttctccgagcggtgaatcttctaccgcaccaggttctactagctctaccgctgaatctccgggcccaggtacttctccgagcggtgaatcttctactgctccaggttccactagctctactgctgaatctcctggcccaggtacttctactccggaaagcggttccgcttctccaggttctactagcgaatctccgtctggcaccgcaccaggttctactagctctactgcagaatctcctggcccaggtacctctactccggaaagcggctctgcatctccaggtacttctacccctgaaagcggttctgcatctcca

SEQ ID NO: 166 - DNA, 2625 bp, Artificial Sequence
  Description of Artificial Sequence: Synthetic polynucleotide
ggtacttctactgaaccgtctgaaggcagcgcaccaggtagcgaaccggctacttccggttctgaaaccccaggtagcccagcaggttctccaacttctactgaagaaggttctaccagctctaccgcagaatctcctggtccaggtacctctactccggaaagcggctctgcatctccaggttctactagcgaatctccttctggcactgcaccaggttctactagcgaatccccgtctggtactgctccaggtacttctactcctgaaagcggttccgcttctccaggtacctctactccggaaagcggttctgcatctccaggtagcgaaccggcaacctccggctctgaaaccccaggtacctctgaaagcgctactcctgaatccggcccaggtagcccggcaggttctccgacttccactgaggaaggtacctctactgaaccttctgagggcagcgctccaggtacttctgaaagcgctaccccggagtccggtccaggtacttctactgaaccgtccgaaggtagcgcaccaggtacttctaccgaaccgtccgagggtagcgcaccaggtagcccagcaggttctcctacctccaccgaggaaggtacttctaccgaaccgtccgagggtagcgcaccaggtacttctaccgaaccttccgagggcagcgcaccaggtacttctgaaagcgctacccctgagtccggcccaggtacttctgaaagcgctactcctgaatccggtccaggtacctctactgaaccttccgaaggcagcgctccaggtacctctaccgaaccgtccgagggcagcgcaccaggtacttctgaaagcgcaacccctgaatccggtccaggtacttctactgaaccttccgaaggtagcgctccaggtagcgaacctgctacttctggttctgaaaccccaggtagcccggctggctctccgacctccaccgaggaaggtagctctaccccgtctggtgctactggttctccaggtactccgggcagcggtactgcttcttcctctccaggtagctctaccccttctggtgctactggctctccaggtacctctaccgaaccgtccgagggtagcgcaccaggtacctctactgaaccgtctgagggtagcgctccaggtagcgaaccggcaacctccggttctgaaactccaggtagccctgctggctctccgacttctactgaggaaggtagcccggctggttctccgacttctactgaggaaggtacttctaccgaaccttccgaaggtagcgctccaggtgcaagcgcaagcggcgcgccaagcacgggaggtacttctgaaagcgctactcctgagtccggcccaggtagcccggctggctctccgacttccaccgaggaaggtagcccggctggctctccaacttctactgaagaaggttctaccagctctaccgctgaatctcctggcccaggttctactagcgaatctccgtctggcaccgcaccaggtacttcccctagcggtgaatcttctactgcaccaggtacccctggcagcggtaccgcttcttcctctccaggtagctctaccccgtctggtgctactggctctccaggttctagcccgtctgcatctaccggtaccggcccaggtagcgaaccggcaacctccggctctgaaactccaggtacttctgaaagcgctactccggaatccggcccaggtagcgaaccggctacttccggctctgaaaccccaggttccaccagctctactgcagaatctccgggcccaggttctactagctctactgcagaatctccgggtccaggtacttctcctagcggcgaatcttctaccgctccaggtagcgaaccggcaacctctggctctgaaactccaggtagcgaacctgcaacctccggctctgaaaccccaggtacttctactgaaccttctgagggcagcgcaccaggttctaccagctctaccgcagaatctcctggtccaggtacctctactccggaaagcggctctgcatctccaggttctactagcgaatctccttctggcactgcaccaggtacttctaccgaaccgtccgaaggcagcgctccaggtacctctactgaaccttccgagggcagcgctccaggtacctctaccgaaccttctgaaggtagcgcaccaggtagctctactccgtctggtgcaaccggctccccaggttctagcccgtctgcttccactggtactggcccaggtgcttccccgggcaccagctctactggttctccaggtagcgaacctgctacctccggttctgaaaccccaggtacctctgaaagcgcaactccggagtctggtccaggtagccctgcaggttctcctacctccactgaggaaggtagctctactccgtctggtgcaaccggctccccaggttctagcccgtctgcttccactggtactggcccaggtgcttccccgggcaccagctctactggttctccaggtacctctgaaagcgctactccggagtctggcccaggtacctctactgaaccgtctgagggtagcgctccaggtacttctactgaaccgtccgaaggtagcgcacca

SEQ ID NO: 167 - DNA, 2592 bp, Artificial Sequence
  Description of Artificial Sequence: Synthetic polynucleotide
ggtagcccggctggctctcctacctctactgaggaaggtacttctgaaagcgctactcctgagtctggtccaggtacctctactgaaccgtccgaaggtagcgctccaggtagcccagcaggctctccgacttccactgaggaaggtacttctactgaaccttccgaaggcagcgcaccaggtacctctactgaaccttctgagggcagcgctccaggtacttctgaaagcgctaccccggaatctggcccaggtagcgaaccggctacttctggttctgaaaccccaggtagcgaaccggctacctccggttctgaaactccaggtagcccggcaggctctccgacctctactgaggaaggtacttctgaaagcgcaaccccggagtccggcccaggtacctctaccgaaccgtctgagggcagcgcaccaggtacttctaccgaaccgtccgagggtagcgcaccaggtagcccagcaggttctcctacctccaccgaggaaggtacttctaccgaaccgtccgagggtagcgcaccaggtacctctactgaaccttctgagggcagcgctccaggtacttctgaaagcgctaccccggagtccggtccaggtacttctactgaaccgtccgaaggtagcgcaccaggtacttctgaaagcgcaacccctgaatccggtccaggtagcgaaccggctacttctggctctgagactccaggtacttctaccgaaccgtccgaaggtagcgcaccaggtacttctactgaaccgtctgaaggtagcgcaccaggtacttctgaaagcgcaaccccggaatccggcccaggtacctctgaaagcgcaaccccggagtccggcccaggtagccctgctggctctccaacctccaccgaagaaggtacctctgaaagcgcaacccctgaatccggcccaggtagcgaaccggcaacctccggttctgaaaccccaggtacctctgaaagcgctactccggagtctggcccaggtacctctactgaaccgtctgagggtagcgctccaggtacttctactgaaccgtccgaaggtagcgcaccaggtacttctaccgaaccgtccgaaggcagcgctccaggtacctctactgaaccttccgagggcagcgctccaggtacctctaccgaaccttctgaaggtagcgcaccaggtacttctaccgaaccgtccgagggtagcgcaccaggtagcccagcaggttctcctacctccaccgaggaaggtacttctaccgaaccgtccgagggtagcgcaccaggtacctctgaaagcgcaactcctgagtctggcccaggtagcgaacctgctacctccggctctgagactccaggtacctctgaaagcgcaaccccggaatctggtccaggtagcgaacctgcaacctctggctctgaaaccccaggtacctctgaaagcgctactcctgaatctggcccaggtacttctactgaaccgtccgagggcagcgcaccaggtacttctgaaagcgctactcctgagtccggcccaggtagcccggctggctctccgacttccaccgaggaaggtagcccggctggctctccaacttctactgaagaaggtagcccggcaggctctccgacctctactgaggaaggtacttctgaaagcgcaaccccggagtccggcccaggtacctctaccgaaccgtctgagggcagcgcaccaggtacctctgaaagcgcaactcctgagtctggcccaggtagcgaacctgctacctccggctctgagactccaggtacctctgaaagcgcaaccccggaatctggtccaggtagcgaacctgcaacctctggctctgaaaccccaggtacctctgaaagcgctactcctgaatctggcccaggtacttctactgaaccgtccgagggcagcgcaccaggtagccctgctggctctccaacctccaccgaagaaggtacctctgaaagcgcaacccctgaatccggcccaggtagcgaaccggcaacctccggttctgaaaccccaggtacttctgaaagcgctactcctgagtccggcccaggtagcccggctggctctccgacttccaccgaggaaggtagcccggctggctctccaacttctactgaagaaggtacttctaccgaaccttccgagggcagcgcaccaggtacttctgaaagcgctacccctgagtccggcccaggtacttctgaaagcgctactcctgaatccggtccaggtacttctgaaagcgctaccccggaatctggcccaggtagcgaaccggctacttctggttctgaaaccccaggtagcgaaccggctacctccggttctgaaactccaggtagcccagcaggctctccgacttccactgaggaaggtacttctactgaaccttccgaaggcagcgcaccaggtacctctactgaaccttctgagggcagcgctccaggtagcgaacctgcaacctctggctctgaaaccccaggtacctctgaaagcgctactcctgaatctggcccaggtacttctactgaaccgtccgagggcagcgcacca

SEQ ID NO: 168 - DNA, 2625 bp, Artificial Sequence
  Description of Artificial Sequence: Synthetic polynucleotide
  modified_base (1287)..(1298): a, c, t, g, unknown or other
  modified_base (1330)..(1337): a, c, t, g, unknown or other
ggttctaccagcgaatctccttctggcaccgctccaggtacctctcctagcggcgaatcttctaccgctccaggttctactagcgaatctccttctggcactgcaccaggttctactagcgaatccccgtctggtactgctccaggtacttctactcctgaaagcggttccgcttctccaggtacctctactccggaaagcggttctgcatctccaggttctaccagcgaatctccttctggcaccgctccaggttctactagcgaatccccgtctggtaccgcaccaggtacttctcctagcggcgaatcttctaccgcaccaggttctactagcgaatctccgtctggcactgctccaggtacttctcctagcggtgaatcttctaccgctccaggtacttcccctagcggcgaatcttctaccgctccaggttctactagctctactgcagaatctccgggcccaggtacctctcctagcggtgaatcttctaccgctccaggtacttctccgagcggtgaatcttctaccgctccaggttctactagctctactgcagaatctcctggcccaggtacctctactccggaaagcggctctgcatctccaggtacttctacccctgaaagcggttctgcatctccaggttctactagcgaatctccttctggcactgcaccaggttctaccagcgaatctccgtctggcactgcaccaggtacctctacccctgaaagcggttccgcttctccaggttctaccagctctaccgcagaatctcctggtccaggtacctctactccggaaagcggctctgcatctccaggttctactagcgaatctccttctggcactgcaccaggtacttctccgagcggtgaatcttctaccgcaccaggttctactagctctaccgctgaatctccgggcccaggtacttctccgagcggtgaatcttctactgctccaggtacctctactcctgaaagcggttctgcatctccaggttccactagctctaccgcagaatctccgggcccaggttctactagctctactgctgaatctcctggcccaggttctactagctctactgctgaatctccgggtccaggttctaccagctctactgctgaatctcctggtccaggtacctccccgagcggtgaatcttctactgcaccaggttctactagcgaatctccttctggcactgcaccaggttctaccagcgaatctccgtctggcactgcaccaggtacctctacccctgaaagcggtccnnnnnnnnnnnntgcaagcgcaagcggcgcgccaagcacgggannnnnnnntagcgaatctccttctggtaccgctccaggttctaccagcgaatccccgtctggtactgctccaggttctaccagcgaatctccttctggtactgcaccaggttctactagcgaatctccttctggtaccgctccaggttctaccagcgaatccccgtctggtactgctccaggttctaccagcgaatctccttctggtactgcaccaggtacttctactccggaaagcggttccgcatctccaggtacttctcctagcggtgaatcttctactgctccaggtacctctcctagcggcgaatcttctactgctccaggttctaccagctctactgctgaatctccgggtccaggtacttccccgagcggtgaatcttctactgcaccaggtacttctactccggaaagcggttccgcttctccaggttctaccagcgaatctccttctggcaccgctccaggttctactagcgaatccccgtctggtaccgcaccaggtacttctcctagcggcgaatcttctaccgcaccaggttctactagcgaatccccgtctggtaccgcaccaggtacttctaccccggaaagcggctctgcttctccaggtacttctaccccggaaagcggctccgcatctccaggttctactagcgaatctccttctggtaccgctccaggtacttctacccctgaaagcggctccgcttctccaggttccactagctctaccgctgaatctccgggtccaggttctaccagcgaatctccttctggcaccgctccaggttctactagcgaatccccgtctggtaccgcaccaggtacttctcctagcggcgaatcttctaccgcaccaggttctaccagctctactgctgaatctccgggtccaggtacttccccgagcggtgaatcttctactgcaccaggtacttctactccggaaagcggttccgcttctccaggtacctcccctagcggcgaatcttctactgctccaggtacctctcctagcggcgaatcttctaccgctccaggtacctcccctagcggtgaatcttctaccgcaccaggttctactagctctactgctgaatctccgggtccaggttctaccagctctactgctgaatctcctggtccaggtacctccccgagcggtgaatcttctactgcaccaggttctagcccttctgcttccaccggtaccggcccaggtagctctactccgtctggtgcaactggctctccaggtagctctactccgtctggtgcaaccggctcccca

SEQ ID NO: 169 - DNA, 2592 bp, Artificial Sequence
  Description of Artificial Sequence: Synthetic polynucleotide
ggtgcttccccgggcaccagctctactggttctccaggttctagcccgtctgcttctactggtactggtccaggttctagcccttctgcttccactggtactggtccaggtaccccgggtagcggtaccgcttcttcttctccaggtagctctactccgtctggtgctaccggctctccaggttctaacccttctgcatccaccggtaccggcccaggtgcttctccgggcaccagctctactggttctccaggtaccccgggcagcggtaccgcatcttcttctccaggtagctctactccttctggtgcaactggttctccaggtactcctggcagcggtaccgcttcttcttctccaggtgcttctcctggtactagctctactggttctccaggtgcttctccgggcactagctctactggttctccaggtaccccgggtagcggtactgcttcttcctctccaggtagctctaccccttctggtgcaaccggctctccaggtgcttctccgggcaccagctctaccggttctccaggtaccccgggtagcggtaccgcttcttcttctccaggtagctctactccgtctggtgctaccggctctccaggttctaacccttctgcatccaccggtaccggcccaggttctagcccttctgcttccaccggtactggcccaggtagctctaccccttctggtgctaccggctccccaggtagctctactccttctggtgcaactggctctccaggtgcatctccgggcactagctctactggttctccaggtgcatcccctggcactagctctactggttctccaggtgcttctcctggtaccagctctactggttctccaggtactcctggcagcggtaccgcttcttcttctccaggtgcttctcctggtactagctctactggttctccaggtgcttctccgggcactagctctactggttctccaggtgcttccccgggcactagctctaccggttctccaggttctagcccttctgcatctactggtactggcccaggtactccgggcagcggtactgcttcttcctctccaggtgcatctccgggcactagctctactggttctccaggtgcatcccctggcactagctctactggttctccaggtgcttctcctggtaccagctctactggttctccaggtagctctactccgtctggtgcaaccggttccccaggtagctctactccttctggtgctactggctccccaggtgcatcccctggcaccagctctaccggttctccaggtaccccgggcagcggtaccgcatcttcctctccaggtagctctaccccgtctggtgctaccggttccccaggtagctctaccccgtctggtgcaaccggctccccaggtagctctactccgtctggtgcaaccggctccccaggttctagcccgtctgcttccactggtactggcccaggtgcttccccgggcaccagctctactggttctccaggtgcatccccgggtaccagctctaccggttctccaggtactcctggcagcggtactgcatcttcctctccaggtgcttctccgggcaccagctctactggttctccaggtgcatctccgggcactagctctactggttctccaggtgcatcccctggcactagctctactggttctccaggtgcttctcctggtaccagctctactggttctccaggtacccctggtagcggtactgcttcttcctctccaggtagctctactccgtctggtgctaccggttctccaggtaccccgggtagcggtaccgcatcttcttctccaggtagctctaccccgtctggtgctactggttctccaggtactccgggcagcggtactgcttcttcctctccaggtagctctaccccttctggtgctactggctctccaggtagctctaccccgtctggtgctactggctccccaggttctagcccttctgcatccaccggtaccggtccaggttctagcccgtctgcatctactggtactggtccaggtgcatccccgggcactagctctaccggttctccaggtactcctggtagcggtactgcttcttcttctccaggtagctctactccttctggtgctactggttctccaggttctagcccttctgcatccaccggtaccggcccaggttctagcccgtctgcttctaccggtactggtccaggtgcttctccgggtactagctctactggttctccaggtgcatctcctggtactagctctactggttctccaggtagctctactccgtctggtgcaaccggctctccaggttctagcccttctgcatctaccggtactggtccaggtgcatcccctggtaccagctctaccggttctccaggttctagcccttctgcttctaccggtaccggtccaggtacccctggcagcggtaccgcatcttcctctccaggtagctctactccgtctggtgcaaccggttccccaggtagctctactccttctggtgctactggctccccaggtgcatcccctggcaccagctctaccggttctcca

SEQ ID NO: 170 - DNA, 2772 bp, Artificial Sequence
  Description of Artificial Sequence: Synthetic polynucleotide
atggctgaacctgctggctctccaacctccactgaggaaggtgcatccccgggcaccagctctaccggttctccaggtagctctaccccgtctggtgctaccggctctccaggtagctctaccccgtctggtgctactggctctccaggtacttctactgaaccgtctgaaggcagcgcaccaggtagcgaaccggctacttccggttctgaaaccccaggtagcccagcaggttctccaacttctactgaagaaggttctaccagctctaccgcagaatctcctggtccaggtacctctactccggaaagcggctctgcatctccaggttctactagcgaatctccttctggcactgcaccaggttctactagcgaatccccgtctggtactgctccaggtacttctactcctgaaagcggttccgcttctccaggtacctctactccggaaagcggttctgcatctccaggtagcgaaccggcaacctccggctctgaaaccccaggtacctctgaaagcgctactcctgaatccggcccaggtagcccggcaggttctccgacttccactgaggaaggtacctctactgaaccttctgagggcagcgctccaggtacttctgaaagcgctaccccggagtccggtccaggtacttctactgaaccgtccgaaggtagcgcaccaggtacttctaccgaaccgtccgagggtagcgcaccaggtagcccagcaggttctcctacctccaccgaggaaggtacttctaccgaaccgtccgagggtagcgcaccaggtacttctaccgaaccttccgagggcagcgcaccaggtacttctgaaagcgctacccctgagtccggcccaggtacttctgaaagcgctactcctgaatccggtccaggtacctctactgaaccttccgaaggcagcgctccaggtacctctaccgaaccgtccgagggcagcgcaccaggtacttctgaaagcgcaacccctgaatccggtccaggtacttctactgaaccttccgaaggtagcgctccaggtagcgaacctgctacttctggttctgaaaccccaggtagcccggctggctctccgacctccaccgaggaaggtagctctaccccgtctggtgctactggttctccaggtactccgggcagcggtactgcttcttcctctccaggtagctctaccccttctggtgctactggctctccaggtacctctaccgaaccgtccgagggtagcgcaccaggtacctctactgaaccgtctgagggtagcgctccaggtagcgaaccggcaacctccggttctgaaactccaggtagccctgctggctctccgacttctactgaggaaggtagcccggctggttctccgacttctactgaggaaggtacttctaccgaaccttccgaaggtagcgctccaggtgcaagcgcaagcggcgcgccaagcacgggaggtacttctgaaagcgctactcctgagtccggcccaggtagcccggctggctctccgacttccaccgaggaaggtagcccggctggctctccaacttctactgaagaaggttctaccagctctaccgctgaatctcctggcccaggttctactagcgaatctccgtctggcaccgcaccaggtacttcccctagcggtgaatcttctactgcaccaggtacccctggcagcggtaccgcttcttcctctccaggtagctctaccccgtctggtgctactggctctccaggttctagcccgtctgcatctaccggtaccggcccaggtagcgaaccggcaacctccggctctgaaactccaggtacttctgaaagcgctactccggaatccggcccaggtagcgaaccggctacttccggctctgaaaccccaggttccaccagctctactgcagaatctccgggcccaggttctactagctctactgcagaatctccgggtccaggtacttctcctagcggcgaatcttctaccgctccaggtagcgaaccggcaacctctggctctgaaactccaggtagcgaacctgcaacctccggctctgaaaccccaggtacttctactgaaccttctgagggcagcgcaccaggttctaccagctctaccgcagaatctcctggtccaggtacctctactccggaaagcggctctgcatctccaggttctactagcgaatctccttctggcactgcaccaggtacttctaccgaaccgtccgaaggcagcgctccaggtacctctactgaaccttccgagggcagcgctccaggtacctctaccgaaccttctgaaggtagcgcaccaggtagctctactccgtctggtgcaaccggctccccaggttctagcccgtctgcttccactggtactggcccaggtgcttccccgggcaccagctctactggttctccaggtagcgaacctgctacctccggttctgaaaccccaggtacctctgaaagcgcaactccggagtctggtccaggtagccctgcaggttctcctacctccactgaggaaggtagctctactccgtctggtgcaaccggctccccaggttctagcccgtctgcttccactggtactggcccaggtgcttccccgggcaccagctctactggttctccaggtacctctgaaagcgctactccggagtctggcccaggtacctctactgaaccgtctgagggtagcgctccaggtacttctactgaaccgtccgaaggtagcgcacca

SEQ ID NO: 171 - DNA, 2739 bp, Artificial Sequence
  Description of Artificial Sequence: Synthetic polynucleotide
atggctgaacctgctggctctccaacctccactgaggaaggtaccccgggtagcggtactgcttcttcctctccaggtagctctaccccttctggtgcaaccggctctccaggtgcttctccgggcaccagctctaccggttctccaggtagcccggctggctctcctacctctactgaggaaggtacttctgaaagcgctactcctgagtctggtccaggtacctctactgaaccgtccgaaggtagcgctccaggtagcccagcaggctctccgacttccactgaggaaggtacttctactgaaccttccgaaggcagcgcaccaggtacctctactgaaccttctgagggcagcgctccaggtacttctgaaagcgctaccccggaatctggcccaggtagcgaaccggctacttctggttctgaaaccccaggtagcgaaccggctacctccggttctgaaactccaggtagcccggcaggctctccgacctctactgaggaaggtacttctgaaagcgcaaccccggagtccggcccaggtacctctaccgaaccgtctgagggcagcgcaccaggtacttctaccgaaccgtccgagggtagcgcaccaggtagcccagcaggttctcctacctccaccgaggaaggtacttctaccgaaccgtccgagggtagcgcaccaggtacctctactgaaccttctgagggcagcgctccaggtacttctgaaagcgctaccccggagtccggtccaggtacttctactgaaccgtccgaaggtagcgcaccaggtacttctgaaagcgcaacccctgaatccggtccaggtagcgaaccggctacttctggctctgagactccaggtacttctaccgaaccgtccgaaggtagcgcaccaggtacttctactgaaccgtctgaaggtagcgcaccaggtacttctgaaagcgcaaccccggaatccggcccaggtacctctgaaagcgcaaccccggagtccggcccaggtagccctgctggctctccaacctccaccgaagaaggtacctctgaaagcgcaacccctgaatccggcccaggtagcgaaccggcaacctccggttctgaaaccccaggtacctctgaaagcgctactccggagtctggcccaggtacctctactgaaccgtctgagggtagcgctccaggtacttctactgaaccgtccgaaggtagcgcaccaggtacttctaccgaaccgtccgaaggcagcgctccaggtacctctactgaaccttccgagggcagcgctccaggtacctctaccgaaccttctgaaggtagcgcaccaggtacttctaccgaaccgtccgagggtagcgcaccaggtagcccagcaggttctcctacctccaccgaggaaggtacttctaccgaaccgtccgagggtagcgcaccaggtacctctgaaagcgcaactcctgagtctggcccaggtagcgaacctgctacctccggctctgagactccaggtacctctgaaagcgcaaccccggaatctggtccaggtagcgaacctgcaacctctggctctgaaaccccaggtacctctgaaagcgctactcctgaatctggcccaggtacttctactgaaccgtccgagggcagcgcaccaggtacttctgaaagcgctactcctgagtccggcccaggtagcccggctggctctccgacttccaccgaggaaggtagcccggctggctctccaacttctactgaagaaggtagcccggcaggctctccgacctctactgaggaaggtacttctgaaagcgcaaccccggagtccggcccaggtacctctaccgaaccgtctgagggcagcgcaccaggtacctctgaaagcgcaactcctgagtctggcccaggtagcgaacctgctacctccggctctgagactccaggtacctctgaaagcgcaaccccggaatctggtccaggtagcgaacctgcaacctctggctctgaaaccccaggtacctctgaaagcgctactcctgaatctggcccaggtacttctactgaaccgtccgagggcagcgcaccaggtagccctgctggctctccaacctccaccgaagaaggtacctctgaaagcgcaacccctgaatccggcccaggtagcgaaccggcaacctccggttctgaaaccccaggtacttctgaaagcgctactcctgagtccggcccaggtagcccggctggctctccgacttccaccgaggaaggtagcccggctggctctccaacttctactgaagaaggtacttctaccgaaccttccgagggcagcgcaccaggtacttctgaaagcgctacccctgagtccggcccaggtacttctgaaagcgctactcctgaatccggtccaggtacttctgaaagcgctaccccggaatctggcccaggtagcgaaccggctacttctggttctgaaaccccaggtagcgaaccggctacctccggttctgaaactccaggtagcccagcaggctctccgacttccactgaggaaggtacttctactgaaccttccgaaggcagcgcaccaggtacctctactgaaccttctgagggcagcgctccaggtagcgaacctgcaacctctggctctgaaaccccaggtacctctgaaagcgctactcctgaatctggcccaggtacttctactgaaccgtccgagggcagcgcacca

SEQ ID NO: 172 - DNA, 3954 bp, Artificial Sequence
  Description of Artificial Sequence: Synthetic polynucleotide
ggtacttctactgaaccgtctgaaggcagcgcaccaggtagcgaaccggctacttccggttctgaaaccccaggtagcccagcaggttctccaacttctactgaagaaggttctaccagctctaccgcagaatctcctggtccaggtacctctactccggaaagcggctctgcatctccaggttctactagcgaatctccttctggcactgcaccaggttctactagcgaatccccgtctggtactgctccaggtacttctactcctgaaagcggttccgcttctccaggtacctctactccggaaagcggttctgcatctccaggtagcgaaccggcaacctccggctctgaaaccccaggtacctctgaaagcgctactcctgaatccggcccaggtagcccggcaggttctccgacttccactgaggaaggtacctctactgaaccttctgagggcagcgctccaggtacttctgaaagcgctaccccggagtccggtccaggtacttctactgaaccgtccgaaggtagcgcaccaggtacttctaccgaaccgtccgagggtagcgcaccaggtagcccagcaggttctcctacctccaccgaggaaggtacttctaccgaaccgtccgagggtagcgcaccaggtacttctaccgaaccttccgagggcagcgcaccaggtacttctgaaagcgctacccctgagtccggcccaggtacttctgaaagcgctactcctgaatccggtccaggtacctctactgaaccttccgaaggcagcgctccaggtacctctaccgaaccgtccgagggcagcgcaccaggtacttctgaaagcgcaacccctgaatccggtccaggtacttctactgaaccttccgaaggtagcgctccaggtagcgaacctgctacttctggttctgaaaccccaggtagcccggctggctctccgacctccaccgaggaaggtagctctaccccgtctggtgctactggttctccaggtactccgggcagcggtactgcttcttcctctccaggtagctctaccccttctggtgctactggctctccaggtacctctaccgaaccgtccgagggtagcgcaccaggtacctctactgaaccgtctgagggtagcgctccaggtagcgaaccggcaacctccggttctgaaactccaggtagccctgctggctctccgacttctactgaggaaggtagcccggctggttctccgacttctactgaggaaggtacttctaccgaaccttccgaaggtagcgctccaggtccagaaccaacggggccggccccaagcggaggtagcgaaccggcaacctccggctctgaaaccccaggtacctctgaaagcgctactcctgaatccggcccaggtagcccggcaggttctccgacttccactgaggaaggtacttctgaaagcgctactcctgagtccggcccaggtagcccggctggctctccgacttccaccgaggaaggtagcccggctggctctccaacttctactgaagaaggtacttctgaaagcgctactcctgagtccggcccaggtagcccggctggctctccgacttccaccgaggaaggtagcccggctggctctccaacttctactgaagaaggttctaccagctctaccgctgaatctcctggcccaggttctactagcgaatctccgtctggcaccgcaccaggtacttcccctagcggtgaatcttctactgcaccaggttctaccagcgaatctccttctggcaccgctccaggttctactagcgaatccccgtctggtaccgcaccaggtacttctcctagcggcgaatcttctaccgcaccaggtacttctaccgaaccttccgagggcagcgcaccaggtacttctgaaagcgctacccctgagtccggcccaggtacttctgaaagcgctactcctgaatccggtccaggtagcgaaccggcaacctctggctctgaaaccccaggtacctctgaaagcgctactccggaatctggtccaggtacttctgaaagcgctactccggaatccggtccaggtacctctactgaaccttctgagggcagcgctccaggtacttctgaaagcgctaccccggagtccggtccaggtacttctactgaaccgtccgaaggtagcgcaccaggtacctcccctagcggcgaatcttctactgctccaggtacctctcctagcggcgaatcttctaccgctccaggtacctcccctagcggtgaatcttctaccgcaccaggtacttctaccgaaccgtccgagggtagcgcaccaggtagcccagcaggttctcctacctccaccgaggaaggtacttctaccgaaccgtccgagggtagcgcaccaggttctagcccttctgcttccaccggtaccggcccaggtagctctactccgtctggtgcaactggctctccaggtagctctactccgtctggtgcaaccggctccccaggtagctctaccccgtctggtgctaccggctctccaggtagctctaccccgtctggtgcaaccggctccccaggtgcatccccgggtactagctctaccggttctccaggtgcaagcgcaagcggcgcgccaagcacgggaggtacttctccgagcggtgaatcttctaccgcaccaggttctactagctctaccgctgaatctccgggcccaggtacttctccgagcggtgaatcttctactgctccaggtacctctgaaagcgctactccggagtctggcccaggtacctctactgaaccgtctgagggtagcgctccaggtacttctactgaaccgtccgaaggtagcgcaccaggttctagcccttctgcatctactggtactggcccaggtagctctactccttctggtgctaccggctctccaggtgcttctccgggtactagctctaccggttctccaggtacttctactccggaaagcggttccgcatctccaggtacttctcctagcggtgaatcttctactgctccaggtacctctcctagcggcgaatcttctactgctccaggtacttctgaaagcgcaacccctgaatccggtccaggtagcgaaccggctacttctggctctgagactccaggtacttctaccgaaccgtccgaaggtagcgcaccaggttctaccagcgaatccccttctggtactgctccaggttctaccagcgaatccccttctggcaccgcaccaggtacttctacccctgaaagcggctccgcttctccaggtagcccggcaggctctccgacctctactgaggaaggtacttctgaaagcgcaaccccggagtccggcccaggtacctctaccgaaccgtctgagggcagcgcaccaggtagccctgctggctctccaacctccaccgaagaaggtacctctgaaagcgcaacccctgaatccggcccaggtagcgaaccggcaacctccggttctgaaaccccaggtagctctaccccgtctggtgctaccggttccccaggtgcttctcctggtactagctctaccggttctccaggtagctctaccccgtctggtgctactggctctccaggttctactagcgaatccccgtctggtactgctccaggtacttcccctagcggtgaatcttctactgctccaggttctaccagctctaccgcagaatctccgggtccaggtagctctaccccttctggtgcaaccggctctccaggtgcatccccgggtaccagctctaccggttctccaggtactccgggtagcggtaccgcttcttcctctccaggtagccctgctggctctccgacttctactgaggaaggtagcccggctggttctccgacttctactgaggaaggtacttctaccgaaccttccgaaggtagcgctcca

SEQ ID NO: 173 - DNA, 2592 bp, Artificial Sequence
  Description of Artificial Sequence: Synthetic polynucleotide
ggtacttccaccgaaccatccgaaccaggtagcgcaggtacttccaccgaaccatccgaacctggcagcgcaggtagcgaaccggcaacctctggtactgaaccatcaggtagcggcgcatccgagcctacctctactgaaccaggtagcgaaccggctacctccggtactgagccatcaggtagcgaaccggcaacttccggtactgaaccatcaggtagcgaaccggcaacttccggcactgaaccatcaggtagcggtgcatctgagccgacctctactgaaccaggtacttctactgaaccatctgagccgggcagcgcaggtagcgaaccagctacttctggcactgaaccatcaggtacttctactgaaccatccgaaccaggtagcgcaggtagcgaacctgctacctctggtactgagccatcaggtagcgaaccggctacctctggtactgaaccatcaggtacttctaccgaaccatccgagcctggtagcgcaggtacttctaccgaaccatccgagccaggcagcgcaggtagcgaaccggcaacctctggcactgagccatcaggtagcgaaccagcaacttctggtactgaaccatcaggtactagcgagccatctacttccgaaccaggtgcaggtagcggcgcatccgaacctacttccactgaaccaggtactagcgagccatccacctctgaaccaggtgcaggtagcgaaccggcaacttccggcactgaaccatcaggtagcgaaccggctacctctggtactgaaccatcaggtacttctaccgaaccatccgagcctggtagcgcaggtacttctaccgaaccatccgagccaggcagcgcaggtagcggtgcatccgagccgacctctactgaaccaggtagcgaaccagcaacttctggcactgagccatcaggtagcgaaccagctacctctggtactgaaccatcaggtagcgaaccggctacttccggcactgaaccatcaggtagcgaaccagcaacctccggtactgaaccatcaggtacttccactgaaccatccgaaccgggtagcgcaggtagcgaaccggcaacttccggcactgaaccatcaggtagcggtgcatctgagccgacctctactgaaccaggtacttctactgaaccatctgagccgggcagcgcaggtagcgaacctgcaacctccggcactgagccatcaggtagcggcgcatctgaaccaacctctactgaaccaggtacttccaccgaaccatctgagccaggcagcgcaggtagcggcgcatctgaaccaacctctactgaaccaggtagcgaaccagcaacttctggtactgaaccatcaggtagcggcgcatctgagcctacttccactgaaccaggtagcgaaccggcaacttccggcactgaaccatcaggtagcggtgcatctgagccgacctctactgaaccaggtacttctactgaaccatctgagccgggcagcgcaggtagcgaaccggcaacttccggcactgaaccatcaggtagcggtgcatctgagccgacctctactgaaccaggtacttctactgaaccatctgagccgggcagcgcaggtagcgaaccagctacttctggcactgaaccatcaggtacttctactgaaccatccgaaccaggtagcgcaggtagcgaacctgctacctctggtactgagccatcaggtacttctactgaaccatccgagccgggtagcgcaggtacttccactgaaccatctgaacctggtagcgcaggtacttccactgaaccatccgaaccaggtagcgcaggtacttctactgaaccatccgagccgggtagcgcaggtacttccactgaaccatctgaacctggtagcgcaggtacttccactgaaccatccgaaccaggtagcgcaggtactagcgaaccatccacctccgaaccaggcgcaggtagcggtgcatctgaaccgacttctactgaaccaggtacttccactgaaccatctgagccaggtagcgcaggtacttccaccgaaccatccgaaccaggtagcgcaggtacttccaccgaaccatccgaacctggcagcgcaggtagcgaaccggcaacctctggtactgaaccatcaggtagcggtgcatccgagccgacctctactgaaccaggtagcgaaccagcaacttctggcactgagccatcaggtagcgaaccagctacctctggtactgaaccatcaggtagcgaaccggcaacctctggcactgagccatcaggtagcgaaccagcaacttctggtactgaaccatcaggtactagcgagccatctacttccgaaccaggtgcaggtagcgaacctgcaacctccggcactgagccatcaggtagcggcgcatctgaaccaacctctactgaaccaggtacttccaccgaaccatctgagccaggcagcgcaggtagcgaacctgcaacctccggcactgagccatcaggtagcggcgcatctgaaccaacctctactgaaccaggtacttccaccgaaccatctgagccaggcagcgca

SEQ ID NO: 174 - DNA, 2592 bp, Artificial Sequence
  Description of Artificial Sequence: Synthetic polynucleotide
ggtagcgaaactgctacttccggctctgagactgcaggtactagtgaatccgcaactagcgaatctggcgcaggtagcactgcaggctctgagacttccactgaagcaggtactagcgagtccgcaaccagcgaatccggcgcaggtagcgaaactgctacctctggctccgagactgcaggtagcgaaactgcaacctctggctctgaaactgcaggtacttccactgaagcaagtgaaggctccgcatcaggtacttccaccgaagcaagcgaaggctccgcatcaggtactagtgagtccgcaactagcgaatccggtgcaggtagcgaaaccgctacctctggttccgaaactgcaggtacttctaccgaggctagcgaaggttctgcatcaggtagcactgctggttccgagacttctactgaagcaggtactagcgaatctgctactagcgaatccggcgcaggtactagcgaatccgctaccagcgaatccggcgcaggtagcgaaactgcaacctctggttccgagactgcaggtactagcgagtccgctactagcgaatctggcgcaggtacttccactgaagctagtgaaggttctgcatcaggtagcgaaactgctacttctggttccgaaactgcaggtagcgaaaccgctacctctggttccgaaactgcaggtacttctaccgaggctagcgaaggttctgcatcaggtagcactgctggttccgagacttctactgaagcaggtactagcgagtccgctactagcgaatctggcgcaggtacttccactgaagctagtgaaggttctgcatcaggtagcgaaactgctacttctggttccgaaactgcaggtagcactgctggctccgagacttctaccgaagcaggtagcactgcaggttccgaaacttccactgaagcaggtagcgaaactgctacctctggctctgagactgcaggtactagcgaatctgctactagcgaatccggcgcaggtactagcgaatccgctaccagcgaatccggcgcaggtagcgaaactgcaacctctggttccgagactgcaggtactagcgaatctgctactagcgaatccggcgcaggtactagcgaatccgctaccagcgaatccggcgcaggtagcgaaactgcaacctctggttccgagactgcaggtagcgaaaccgctacctctggttccgaaactgcaggtacttctaccgaggctagcgaaggttctgcatcaggtagcactgctggttccgagacttctactgaagcaggtagcgaaactgctacttccggctctgagactgcaggtactagtgaatccgcaactagcgaatctggcgcaggtagcactgcaggctctgagacttccactgaagcaggtagcactgctggttccgaaacctctaccgaagcaggtagcactgcaggttctgaaacctccactgaagcaggtacttccactgaggctagtgaaggctctgcatcaggtagcactgctggttccgaaacctctaccgaagcaggtagcactgcaggttctgaaacctccactgaagcaggtacttccactgaggctagtgaaggctctgcatcaggtagcactgcaggttctgagacttccaccgaagcaggtagcgaaactgctacttctggttccgaaactgcaggtacttccactgaagctagtgaaggttccgcatcaggtactagtgagtccgcaaccagcgaatccggcgcaggtagcgaaaccgcaacctccggttctgaaactgcaggtactagcgaatccgcaaccagcgaatctggcgcaggtactagtgagtccgcaaccagcgaatccggcgcaggtagcgaaaccgcaacctccggttctgaaactgcaggtactagcgaatccgcaaccagcgaatctggcgcaggtagcgaaactgctacttccggctctgagactgcaggtacttccaccgaagcaagcgaaggttccgcatcaggtacttccaccgaggctagtgaaggctctgcatcaggtagcactgctggctccgagacttctaccgaagcaggtagcactgcaggttccgaaacttccactgaagcaggtagcgaaactgctacctctggctctgagactgcaggtactagcgaatctgctactagcgaatccggcgcaggtactagcgaatccgctaccagcgaatccggcgcaggtagcgaaactgcaacctctggttccgagactgcaggtagcgaaactgctacttccggctccgagactgcaggtagcgaaactgctacttctggctccgaaactgcaggtacttctactgaggctagtgaaggttccgcatcaggtactagcgagtccgcaaccagcgaatccggcgcaggtagcgaaactgctacctctggctccgagactgcaggtagcgaaactgcaacctctggctctgaaactgcaggtactagcgaatctgctactagcgaatccggcgcaggtactagcgaatccgctaccagcgaatccggcgcaggtagcgaaactgcaacctctggttccgagactgca

SEQ ID NO: 175 - DNA, 37 bp, Artificial Sequence
  Description of Artificial Sequence: Synthetic oligonucleotide
aggtgcaagcgcaagcggcgcgccaagcacgggaggt

SEQ ID NO: 176 - DNA, 37 bp, Artificial Sequence
  Description of Artificial Sequence: Synthetic oligonucleotide
aggtccagaaccaacggggccggccccaagcggaggt

SEQ ID NO: 177 - protein, 6 aa, Artificial Sequence
  Description of Artificial Sequence: Synthetic 6xHis tag
HHHHHH

SEQ ID NO: 178 - protein, 4 aa, Artificial Sequence
  Description of Artificial Sequence: Synthetic peptide
DDDK

SEQ ID NO: 179 - protein, 4 aa, Artificial Sequence
  Description of Artificial Sequence: Synthetic peptide
IDGR

SEQ ID NO: 180 - protein, 6 aa, Artificial Sequence
  Description of Artificial Sequence: Synthetic peptide
LVPRGS

SEQ ID NO: 181 - protein, 8 aa, Artificial Sequence
  Description of Artificial Sequence: Synthetic peptide
LEVLFQGP

SEQ ID NO: 182 - protein, 7 aa, Artificial Sequence
  Description of Artificial Sequence: Synthetic peptide
EQLYFQG

SEQ ID NO: 183 - protein, 7 aa, Artificial Sequence
  Description of Artificial Sequence: Synthetic peptide
ETLFQGP

SEQ ID NO: 184 - protein, 12 aa, Artificial Sequence
  Description of Artificial Sequence: Synthetic peptide
GESPGGSSGSES

SEQ ID NO: 185 - protein, 12 aa, Artificial Sequence
  Description of Artificial Sequence: Synthetic peptide
GSEGSSGPGESS

SEQ ID NO: 186 - protein, 12 aa, Artificial Sequence
  Description of Artificial Sequence: Synthetic peptide
GSSESGSSEGGP

SEQ ID NO: 187 - protein, 12 aa, Artificial Sequence
  Description of Artificial Sequence: Synthetic peptide
GSGGEPSESGSS

SEQ ID NO: 188 - DNA, 36 bp, Artificial Sequence
  Description of Artificial Sequence: Synthetic oligonucleotide
aggtgaatctccdggtggytcyagcggttcygartc

SEQ ID NO: 189 - DNA, 36 bp, Artificial Sequence
  Description of Artificial Sequence: Synthetic oligonucleotide
acctgaytcrgaaccgctrgarccacchggagattc

SEQ ID NO: 190 - DNA, 36 bp, Artificial Sequence
  Description of Artificial Sequence: Synthetic oligonucleotide
aggtagcgaaggttcttcyggtccdggygartcytc

SEQ ID NO: 191 - DNA, 36 bp, Artificial Sequence
  Description of Artificial Sequence: Synthetic oligonucleotide
acctgargaytcrcchggaccrgaagaaccttcgct

SEQ ID NO: 192 - DNA, 36 bp, Artificial Sequence
  Description of Artificial Sequence: Synthetic oligonucleotide
aggttcytcygaaagcggttcttcygarggyggtcc

SEQ ID NO: 193 - DNA, 36 bp, Artificial Sequence
  Description of Artificial Sequence: Synthetic oligonucleotide
acctggaccrccytcrgaagaaccgctttcrgarga

SEQ ID NO: 194 - DNA, 36 bp, Artificial Sequence
  Description of Artificial Sequence: Synthetic oligonucleotide
aggttcyggtggygaaccdtcygartctggtagctc

SEQ ID NO: 195 - DNA, 24 bp, Artificial Sequence
  Description of Artificial Sequence: Synthetic oligonucleotide
aggttcgtcttcactcgagggtac

SEQ ID NO: 196 - DNA, 16 bp, Artificial Sequence
  Description of Artificial Sequence: Synthetic oligonucleotide
cctcgagtgaagacga

SEQ ID NO: 197 - protein, 36 aa, Artificial Sequence
  Description of Artificial Sequence: Synthetic polypeptide
GSGGEPSESGSSGESPGGSSGSESGESPGGSSGSES

SEQ ID NO: 198 - protein, 36 aa, Artificial Sequence
  Description of Artificial Sequence: Synthetic polypeptide
GSEGSSGPGESSGESPGGSSGSESGSSESGSSEGGP

SEQ ID NO: 199 - protein, 36 aa, Artificial Sequence
  Description of Artificial Sequence: Synthetic polypeptide
GSSESGSSEGGPGSSESGSSEGGPGESPGGSSGSES

SEQ ID NO: 200 - protein, 36 aa, Artificial Sequence
  Description of Artificial Sequence: Synthetic polypeptide
GSGGEPSESGSSGSSESGSSEGGPGSGGEPSESGSS

SEQ ID NO: 201 - protein, 36 aa, Artificial Sequence
  Description of Artificial Sequence: Synthetic polypeptide
GSSESGSSEGGPGSEGSSGPGESSGSEGSSGPGESS

SEQ ID NO: 202 - protein, 36 aa, Artificial Sequence
  Description of Artificial Sequence: Synthetic polypeptide
GSSESGSSEGGPGESPGGSSGSESGSEGSSGPGESS

SEQ ID NO: 203 - protein, 36 aa, Artificial Sequence
  Description of Artificial Sequence: Synthetic polypeptide
GSGGEPSESGSSGSGGEPSESGSSGSEGSSGPGESS

SEQ ID NO: 204 - protein, 36 aa, Artificial Sequence
  Description of Artificial Sequence: Synthetic polypeptide
GSSESGSSEGGPGSEGSSGPGESSGESPGGSSGSES

SEQ ID NO: 205 - protein, 36 aa, Artificial Sequence
  Description of Artificial Sequence: Synthetic polypeptide
GSSESGSSEGGPGSSESGSSEGGPGSSESGSSEGGP

SEQ ID NO: 206 - protein, 36 aa, Artificial Sequence
  Description of Artificial Sequence: Synthetic polypeptide
GSGGEPSESGSSGSEGSSGPGESSGSSESGSSEGGP

SEQ ID NO: 207 - protein, 36 aa, Artificial Sequence; identical to SEQ ID NO: 200
  Description of Artificial Sequence: Synthetic polypeptide

SEQ ID NO: 208 - protein, 36 aa, Artificial Sequence
  Description of Artificial Sequence: Synthetic polypeptide
GSGGEPSESGSSGSSESGSSEGGPGESPGGSSGSES

SEQ ID NO: 209 - protein, 36 aa, Artificial Sequence
  Description of Artificial Sequence: Synthetic polypeptide
GSGGEPSESGSSGESPGGSSGSESGSEGSSGPGESS

SEQ ID NO: 210 - protein, 36 aa, Artificial Sequence
  Description of Artificial Sequence: Synthetic polypeptide
GSGGEPSESGSSGESPGGSSGSESGSGGEPSESGSS

SEQ ID NO: 211 - protein, 36 aa, Artificial Sequence; identical to SEQ ID NO: 205
  Description of Artificial Sequence: Synthetic polypeptide

SEQ ID NO: 212 - protein, 36 aa, Artificial Sequence
  Description of Artificial Sequence: Synthetic polypeptide
GESPGGSSGSESGSEGSSGPGESSGSEGSSGPGESS

SEQ ID NO: 213 - protein, 36 aa, Artificial Sequence
  Description of Artificial Sequence: Synthetic polypeptide
GSGGEPSESGSSGSGGEPSESGSSGSSESGSSEGGP

SEQ ID NO: 214 - protein, 36 aa, Artificial Sequence
  Description of Artificial Sequence: Synthetic polypeptide
GSGGEPSESGSSGSGGEPSESGSSGSGGEPSESGSS

SEQ ID NO: 215 - protein, 36 aa, Artificial Sequence
  Description of Artificial Sequence: Synthetic polypeptide
GSGGEPSESGSSGSSESGSSEGGPGSEGSSGPGESS

SEQ ID NO: 216 - protein, 36 aa, Artificial Sequence
  Description of Artificial Sequence: Synthetic polypeptide
GSGGEPSESGSSGSEGSSGPGESSGSGGEPSESGSS

SEQ ID NO: 217 - protein, 36 aa, Artificial Sequence; identical to SEQ ID NO: 210
  Description of Artificial Sequence: Synthetic polypeptide

SEQ ID NO: 218 - protein, 36 aa, Artificial Sequence
  Description of Artificial Sequence: Synthetic polypeptide
GSSESGSSEGGPGSGGEPSESGSSGSSESGSSEGGP

SEQ ID NO: 219 - protein, 36 aa, Artificial Sequence
  Description of Artificial Sequence: Synthetic polypeptide
GSEGSSGPGESSGESPGGSSGSESGSEGSSGPGESS

SEQ ID NO: 220 - protein, 36 aa, Artificial Sequence; identical to SEQ ID NO: 205
  Description of Artificial Sequence: Synthetic polypeptide

SEQ ID NO: 221 - protein, 36 aa, Artificial Sequence; identical to SEQ ID NO: 197
  Description of Artificial Sequence: Synthetic polypeptide

SEQ ID NO: 222 - protein, 36 aa, Artificial Sequence
  Description of Artificial Sequence: Synthetic polypeptide
GSGGEPSESGSSGSEGSSGPGESSGESPGGSSGSES

SEQ ID NO: 223 - protein, 36 aa, Artificial Sequence
  Description of Artificial Sequence: Synthetic polypeptide
GESPGGSSGSESGESPGGSSGSESGESPGGSSGSES

SEQ ID NO: 224 - protein, 36 aa, Artificial Sequence
  Description of Artificial Sequence: Synthetic polypeptide
GSEGSSGPGESSGSEGSSGPGESSGSGGEPSESGSS

SEQ ID NO: 225 - protein, 36 aa, Artificial Sequence; identical to SEQ ID NO: 222
  Description of Artificial Sequence: Synthetic polypeptide

SEQ ID NO: 226 - protein, 36 aa, Artificial Sequence; identical to SEQ ID NO: 200
  Description of Artificial Sequence: Synthetic polypeptide

SEQ ID NO: 227 - protein, 36 aa, Artificial Sequence
  Description of Artificial Sequence: Synthetic polypeptide
GSSESGSSEGGPGSGGEPSESGSSGSEGSSGPGESS

SEQ ID NO: 228 - protein, 36 aa, Artificial Sequence
  Description of Artificial Sequence: Synthetic polypeptide
GSGGEPSESGSSGSEGSSGPGESSGSEGSSGPGESS

SEQ ID NO: 229 - protein, 36 aa, Artificial Sequence; identical to SEQ ID NO: 200
  Description of Artificial Sequence: Synthetic polypeptide

SEQ ID NO: 230 - protein, 36 aa, Artificial Sequence; identical to SEQ ID NO: 197
  Description of Artificial Sequence: Synthetic polypeptide

SEQ ID NO: 231 - protein, 36 aa, Artificial Sequence
  Description of Artificial Sequence: Synthetic polypeptide
GSGGEPSESGSSGSGGEPSESGSSGESPGGSSGSES

SEQ ID NO: 232 - protein, 36 aa, Artificial Sequence
  Description of Artificial Sequence: Synthetic polypeptide
GSEGSSGPGESSGSSESGSSEGGPGSEGSSGPGESS

SEQ ID NO: 233 - protein, 36 aa, Artificial Sequence
  Description of Artificial Sequence: Synthetic polypeptide
GSSESGSSEGGPGESPGGSSGSESGESPGGSSGSES

SEQ ID NO: 234 - protein, 36 aa, Artificial Sequence; identical to SEQ ID NO: 224
  Description of Artificial Sequence: Synthetic polypeptide

SEQ ID NO: 235 - DNA, 108 bp, Artificial Sequence
  Description of Artificial Sequence: Synthetic polynucleotide
ggttctggtggcgaaccgtccgagtctggtagctcaggtgaatctccgggtggctctagcggttccgagtcaggtgaatctcctggtggttccagcggttccgagtca

SEQ ID NO: 236 - DNA, 108 bp, Artificial Sequence
  Description of Artificial Sequence: Synthetic polynucleotide
ggtagcgaaggttcttctggtcctggcgagtcttcaggtgaatctcctggtggttccagcggttctgaatcaggttcctccgaaagcggttcttccgagggcggtcca

SEQ ID NO: 237 - DNA, 108 bp, Artificial Sequence
  Description of Artificial Sequence: Synthetic polynucleotide
ggttcctctgaaagcggttcttccgaaggtggtccaggttcctctgaaagcggttcttctgagggtggtccaggtgaatctccgggtggctccagcggttccgagtca

SEQ ID NO: 238 - DNA, 108 bp, Artificial Sequence
  Description of Artificial Sequence: Synthetic polynucleotide
ggttccggtggcgaaccgtctgaatctggtagctcaggttcttctgaaagcggttcttccgagggtggtccaggttctggtggtgaaccttccgagtctggtagctca

SEQ ID NO: 239 - DNA, 108 bp, Artificial Sequence
  Description of Artificial Sequence: Synthetic polynucleotide
ggttcttccgaaagcggttcttctgagggtggtccaggtagcgaaggttcttccggtccaggtgagtcttcaggtagcgaaggttcttctggtcctggtgaatcttca

SEQ ID NO: 240 - DNA, 108 bp, Artificial Sequence
  Description of Artificial Sequence: Synthetic polynucleotide
ggttcctctgaaagcggttcttccgagggtggtccaggtgaatctccaggtggttccagcggttctgagtcaggtagcgaaggttcttctggtccaggtgaatcctca

SEQ ID NO: 241 - DNA, 108 bp, Artificial Sequence
  Description of Artificial Sequence: Synthetic polynucleotide
ggttctggtggtgaaccgtctgagtctggtagctcaggttccggtggcgaaccatccgaatctggtagctcaggtagcgaaggttcttccggtccaggtgagtcttca

SEQ ID NO: 242 - DNA, 108 bp, Artificial Sequence
  Description of Artificial Sequence: Synthetic polynucleotide
ggttcttccgaaagcggttcttccgaaggcggtccaggtagcgaaggttcttctggtccaggcgaatcttcaggtgaatctcctggtggctccagcggttctgagtca

SEQ ID NO: 243 - DNA, 108 bp, Artificial Sequence
  Description of Artificial Sequence: Synthetic polynucleotide
ggttcctccgaaagcggttcttctgagggcggtccaggttcctccgaaagcggttcttccgagggcggtccaggttcttctgaaagcggttcttccgagggcggtcca

SEQ ID NO: 244 - DNA, 108 bp, Artificial Sequence
  Description of Artificial Sequence: Synthetic polynucleotide
ggttccggtggcgaaccgtccgaatctggtagctcaggtagcgaaggttcttctggtccaggcgaatcttcaggttcctctgaaagcggttcttctgagggcggtcca

SEQ ID NO: 245 - DNA, 108 bp, Artificial Sequence
  Description of Artificial Sequence: Synthetic polynucleotide
ggttctggtggtgaaccgtccgaatctggtagctcaggttcttccgaaagcggttcttctgaaggtggtccaggttccggtggcgaaccttctgaatctggtagctca

SEQ ID NO: 246 - DNA, 108 bp, Artificial Sequence
  Description of Artificial Sequence: Synthetic polynucleotide
ggttctggtggcgaaccgtccgaatctggtagctcaggttcctccgaaagcggttcttctgaaggtggtccaggtgaatctccaggtggttctagcggttctgaatca

SEQ ID NO: 247 - DNA, 108 bp, Artificial Sequence
  Description of Artificial Sequence: Synthetic polynucleotide
ggttctggtggcgaaccgtctgagtctggtagctcaggtgaatctcctggtggctccagcggttctgaatcaggtagcgaaggttcttctggtcctggtgaatcttca

SEQ ID NO: 248 - DNA, 108 bp, Artificial Sequence
  Description of Artificial Sequence: Synthetic polynucleotide
ggttccggtggcgaaccttccgaatctggtagctcaggtgaatctccgggtggttctagcggttctgagtcaggttctggtggtgaaccttccgagtctggtagctca

SEQ ID NO: 249 - DNA, 108 bp, Artificial Sequence
  Description of Artificial Sequence: Synthetic polynucleotide
ggttcctctgaaagcggttcttctgagggcggtccaggttcttccgaaagcggttcttccgagggcggtccaggttcttccgaaagcggttcttctgaaggcggtcca

SEQ ID NO: 250 - DNA, 108 bp, Artificial Sequence
  Description of Artificial Sequence: Synthetic polynucleotide
ggtgaatctccgggtggctccagcggttctgagtcaggtagcgaaggttcttccggtccgggtgagtcctcaggtagcgaaggttcttccggtcctggtgagtcttca

SEQ ID NO: 251 - DNA, 108 bp, Artificial Sequence
  Description of Artificial Sequence: Synthetic polynucleotide
ggttctggtggcgaaccttccgaatctggtagctcaggttccggtggtgaaccttctgaatctggtagctcaggttcttctgaaagcggttcttccgagggcggtcca

SEQ ID NO: 252 - DNA, 108 bp, Artificial Sequence
  Description of Artificial Sequence: Synthetic polynucleotide
ggttccggtggtgaaccttctgaatctggtagctcaggttccggtggcgaaccatccgagtctggtagctcaggttccggtggtgaaccatccgagtctggtagctca

SEQ ID NO: 253 - DNA, 108 bp, Artificial Sequence
  Description of Artificial Sequence: Synthetic polynucleotide
ggttccggtggcgaaccttctgaatctggtagctcaggttcctccgaaagcggttcttctgagggcggtccaggtagcgaaggttcttctggtccgggcgagtcttca

SEQ ID NO: 254 - DNA, 108 bp, Artificial Sequence
  Description of Artificial Sequence: Synthetic polynucleotide
ggttccggtggtgaaccgtccgagtctggtagctcaggtagcgaaggttcttctggtccgggtgagtcttcaggttctggtggcgaaccgtccgaatctggtagctca

SEQ ID NO: 255 - DNA, 108 bp, Artificial Sequence
  Description of Artificial Sequence: Synthetic polynucleotide
ggttctggtggcgaaccgtccgaatctggtagctcaggtgaatctcctggtggttccagcggttccgagtcaggttctggtggcgaaccttccgaatctggtagctca

SEQ ID NO: 256 - DNA, 108 bp, Artificial Sequence
  Description of Artificial Sequence: Synthetic polynucleotide
ggttcttccgaaagcggttcttccgagggcggtccaggttccggtggtgaaccatctgaatctggtagctcaggttcttctgaaagcggttcttctgaaggtggtcca

SEQ ID NO: 257 - DNA, 108 bp, Artificial Sequence
  Description of Artificial Sequence: Synthetic polynucleotide
ggtagcgaaggttcttccggtcctggtgagtcttcaggtgaatctccaggtggctctagcggttccgagtcaggtagcgaaggttcttctggtcctggcgagtcctca

SEQ ID NO: 258 - DNA, 108 bp, Artificial Sequence
  Description of Artificial Sequence: Synthetic polynucleotide
ggttcctctgaaagcggttcttccgaaggcggtccaggttcttccgaaagcggttcttctgagggcggtccaggttcctccgaaagcggttcttctgagggtggtcca

SEQ ID NO: 259 - DNA, 108 bp, Artificial Sequence
  Description of Artificial Sequence: Synthetic polynucleotide
ggttctggtggcgaaccttccgagtctggtagctcaggtgaatctccgggtggttctagcggttccgagtcaggtgaatctccgggtggttccagcggttctgagtca

SEQ ID NO: 260 - DNA, 108 bp, Artificial Sequence
  Description of Artificial Sequence: Synthetic polynucleotide
ggttctggtggcgaaccatctgagtctggtagctcaggtagcgaaggttcttccggtccaggcgagtcttcaggtgaatctcctggtggctccagcggttctgagtca

SEQ ID NO: 261 - DNA, 108 bp, Artificial Sequence
  Description of Artificial Sequence: Synthetic polynucleotide
ggtgaatctcctggtggttccagcggttccgagtcaggtgaatctccaggtggctctagcggttccgagtcaggtgaatctcctggtggttctagcggttctgaatca

SEQ ID NO: 262 - DNA, 108 bp, Artificial Sequence
  Description of Artificial Sequence: Synthetic polynucleotide
ggtagcgaaggttcttccggtccaggtgaatcttcaggtagcgaaggttcttctggtcctggtgaatcctcaggttccggtggcgaaccatctgaatctggtagctca

SEQ ID NO: 263 - DNA, 108 bp, Artificial Sequence
  Description of Artificial Sequence: Synthetic polynucleotide
ggttctggtggcgaaccatccgaatctggtagctcaggtagcgaaggttcttctggtcctggcgaatcttcaggtgaatctccaggtggctctagcggttccgaatca

SEQ ID NO: 264 - DNA, 108 bp, Artificial Sequence
  Description of Artificial Sequence: Synthetic polynucleotide
ggttccggtggtgaaccgtccgaatctggtagctcaggttcctctgaaagcggttcttccgagggtggtccaggttccggtggtgaaccttctgagtctggtagctca

SEQ ID NO: 265 - DNA, 108 bp, Artificial Sequence
  Description of Artificial Sequence: Synthetic polynucleotide
ggttcctctgaaagcggttcttctgagggcggtccaggttctggtggcgaaccatctgaatctggtagctcaggtagcgaaggttcttccggtccgggtgaatcttca

SEQ ID NO: 266 - DNA, 108 bp, Artificial Sequence
  Description of Artificial Sequence: Synthetic polynucleotide
ggttctggtggtgaaccgtccgaatctggtagctcaggtagcgaaggttcttctggtcctggcgagtcttcaggtagcgaaggttcttctggtcctggtgaatcttca

SEQ ID NO: 267 - DNA, 108 bp, Artificial Sequence
  Description of Artificial Sequence: Synthetic polynucleotide
ggttctggtggcgaaccatccgagtctggtagctcaggttcttccgaaagcggttcttccgaaggcggtccaggttctggtggtgaaccgtccgaatctggtagctca

SEQ ID NO: 268 - DNA, 108 bp, Artificial Sequence
  Description of Artificial Sequence: Synthetic polynucleotide
ggttccggtggcgaaccttccgaatctggtagctcaggtgaatctccgggtggttctagcggttccgaatcaggtgaatctccaggtggttctagcggttccgaatca

SEQ ID NO: 269 - DNA, 108 bp, Artificial Sequence
  Description of Artificial Sequence: Synthetic polynucleotide
ggttccggtggtgaaccatctgagtctggtagctcaggttccggtggcgaaccgtccgagtctggtagctcaggtgaatctccgggtggttccagcggttccgaatca

SEQ ID NO: 270 - DNA, 108 bp, Artificial Sequence
  Description of Artificial Sequence: Synthetic polynucleotide
ggtagcgaaggttcttctggtccgggcgaatcctcaggttcctccgaaagcggttcttccgaaggtggtccaggtagcgaaggttcttccggtcctggtgaatcttca

SEQ ID NO: 271 - DNA, 108 bp, Artificial Sequence
  Description of Artificial Sequence: Synthetic polynucleotide
ggttcctctgaaagcggttcttctgaaggcggtccaggtgaatctccgggtggctccagcggttctgaatcaggtgaatctcctggtggctccagcggttccgagtca

SEQ ID NO: 272 - DNA, 108 bp, Artificial Sequence
  Description of Artificial Sequence: Synthetic polynucleotide
ggtagcgaaggttcttctggtccaggcgagtcttcaggtagcgaaggttcttccggtcctggcgagtcttcaggttccggtggcgaaccgtccgaatctggtagctca

SEQ ID NO: 273 - protein, 12 aa, Artificial Sequence
  Description of Artificial Sequence: Synthetic peptide
GSPAGSPTSTEE

SEQ ID NO: 274 - protein, 12 aa, Artificial Sequence
  Description of Artificial Sequence: Synthetic peptide
GSEPATSGSETP

SEQ ID NO: 275 - protein, 12 aa, Artificial Sequence
  Description of Artificial Sequence: Synthetic peptide
GTSESATPESGP

SEQ ID NO: 276 - protein, 12 aa, Artificial Sequence
  Description of Artificial Sequence: Synthetic peptide
GTSTEPSEGSAP

SEQ ID NO: 277 - DNA, 36 bp, Artificial Sequence
  Description of Artificial Sequence: Synthetic oligonucleotide
aggtagcccdgcwggytctccdacytcyacygarga

SEQ ID NO: 278 - DNA, 36 bp, Artificial Sequence
  Description of Artificial Sequence: Synthetic oligonucleotide
accttcytcrgtrgargthggagarccwgchgggct

SEQ ID NO: 279 - DNA, 36 bp, Artificial Sequence
  Description of Artificial Sequence: Synthetic oligonucleotide
aggtagcgaacckgcwacytcyggytctgaracycc

SEQ ID NO: 280 - DNA, 36 bp, Artificial Sequence
  Description of Artificial Sequence: Synthetic oligonucleotide
acctggrgtytcagarccrgargtwgcmggttcgct

SEQ ID NO: 281 - DNA, 36 bp, Artificial Sequence
  Description of Artificial Sequence: Synthetic oligonucleotide
aggtacytctgaaagcgcwacycckgartcyggycc

SEQ ID NO: 282 - DNA, 36 bp, Artificial Sequence
  Description of Artificial Sequence: Synthetic oligonucleotide
acctggrccrgaytcmggrgtwgcgctttcagargt

SEQ ID NO: 283 - DNA, 36 bp, Artificial Sequence
  Description of Artificial Sequence: Synthetic oligonucleotide
aggtacytctacygaaccktcygarggyagcgcwcc

SEQ ID NO: 284 - DNA, 36 bp, Artificial Sequence
  Description of Artificial Sequence: Synthetic oligonucleotide
acctggwgcgctrccytcrgamggttcrgtagargt

SEQ ID NO: 285 - DNA, 24 bp, Artificial Sequence
  Description of Artificial Sequence: Synthetic oligonucleotide
aggttcgtcttcactcgagggtac

SEQ ID NO: 286 - DNA, 16 bp, Artificial Sequence
  Description of Artificial Sequence: Synthetic oligonucleotide
cctcgagtgaagacga

SEQ ID NO: 287 - protein, 36 aa, Artificial Sequence
  Description of Artificial Sequence: Synthetic polypeptide
GSPAGSPTSTEEGTSESATPESGPGTSTEPSEGSAP

SEQ ID NO: 288 - protein, 36 aa, Artificial Sequence
  Description of Artificial Sequence: Synthetic polypeptide
GTSTEPSEGSAPGTSTEPSEGSAPGTSTEPSEGSAP

SEQ ID NO: 289 - protein, 36 aa, Artificial Sequence
  Description of Artificial Sequence: Synthetic polypeptide
GTSTEPSEGSAPGTSESATPESGPGTSESATPESGP

SEQ ID NO: 290 - protein, 36 aa, Artificial Sequence; identical to SEQ ID NO: 289
  Description of Artificial Sequence: Synthetic polypeptide

SEQ ID NO: 291 - protein, 36 aa, Artificial Sequence
  Description of Artificial Sequence: Synthetic polypeptide
GSEPATSGSETPGTSESATPESGPGSPAGSPTSTEE

SEQ ID NO: 292 - protein, 36 aa, Artificial Sequence
  Description of Artificial Sequence: Synthetic polypeptide
GTSESATPESGPGSEPATSGSETPGTSTEPSEGSAP

SEQ ID NO: 293 - protein, 36 aa, Artificial Sequence
  Description of Artificial Sequence: Synthetic polypeptide
GSPAGSPTSTEEGSPAGSPTSTEEGSEPATSGSETP

SEQ ID NO: 294 - protein, 36 aa, Artificial Sequence; identical to SEQ ID NO: 287
  Description of Artificial Sequence: Synthetic polypeptide

SEQ ID NO: 295 - protein, 36 aa, Artificial Sequence
  Description of Artificial Sequence: Synthetic polypeptide
GSPAGSPTSTEEGSPAGSPTSTEEGTSTEPSEGSAP

SEQ ID NO: 296 - protein, 36 aa, Artificial Sequence
  Description of Artificial Sequence: Synthetic polypeptide
GTSESATPESGPGTSTEPSEGSAPGTSTEPSEGSAP

SEQ ID NO: 297 - protein, 36 aa, Artificial Sequence
  Description of Artificial Sequence: Synthetic polypeptide
GTSTEPSEGSAPGSPAGSPTSTEEGTSTEPSEGSAP

SEQ ID NO: 298 - protein, 36 aa, Artificial Sequence
  Description of Artificial Sequence: Synthetic polypeptide
GSEPATSGSETPGSPAGSPTSTEEGTSESATPESGP

SEQ ID NO: 299 - protein, 36 aa, Artificial Sequence; identical to SEQ ID NO: 289
  Description of Artificial Sequence: Synthetic polypeptide

SEQ ID NO: 300 - protein, 36 aa, Artificial Sequence
  Description of Artificial Sequence: Synthetic polypeptide
GTSTEPSEGSAPGSEPATSGSETPGSPAGSPTSTEE

SEQ ID NO: 301 - protein, 36 aa, Artificial Sequence
  Description of Artificial Sequence: Synthetic polypeptide
GSPAGSPTSTEEGTSESATPESGPGSEPATSGSETP

SEQ ID NO: 302 - protein, 36 aa, Artificial Sequence
  Description of Artificial Sequence: Synthetic polypeptide
GTSESATPESGPGSPAGSPTSTEEGSPAGSPTSTEE

SEQ ID NO: 303 - protein, 36 aa, Artificial Sequence
  Description of Artificial Sequence: Synthetic polypeptide
GTSTEPSEGSAPGTSESATPESGPGTSTEPSEGSAP

SEQ ID NO: 304 - protein, 36 aa, Artificial Sequence
  Description of Artificial Sequence: Synthetic polypeptide
GSPAGSPTSTEEGTSTEPSEGSAPGSEPATSGSETP

SEQ ID NO: 305 - protein, 36 aa, Artificial Sequence
  Description of Artificial Sequence: Synthetic polypeptide
GSPAGSPTSTEEGTSTEPSEGSAPGTSTEPSEGSAP

SEQ ID NO: 306 - protein, 36 aa, Artificial Sequence; identical to SEQ ID NO: 291
  Description of Artificial Sequence: Synthetic polypeptide

SEQ ID NO: 307 - protein, 36 aa, Artificial Sequence; identical to SEQ ID NO: 296
  Description of Artificial Sequence: Synthetic polypeptide

SEQ ID NO: 308 - protein, 36 aa, Artificial Sequence; identical to SEQ ID NO: 305
  Description of Artificial Sequence: Synthetic polypeptide

SEQ ID NO: 309 - protein, 36 aa, Artificial Sequence; identical to SEQ ID NO: 288
  Description of Artificial Sequence: Synthetic polypeptide

SEQ ID NO: 310 - protein, 36 aa, Artificial Sequence
  Description of Artificial Sequence: Synthetic polypeptide
GSEPATSGSETPGTSESATPESGPGTSTEPSEGSAP

SEQ ID NO: 311 - protein, 36 aa, Artificial Sequence; identical to SEQ ID NO: 297
  Description of Artificial Sequence: Synthetic polypeptide

SEQ ID NO: 312 - protein, 36 aa, Artificial Sequence
  Description of Artificial Sequence: Synthetic polypeptide
GSEPATSGSETPGTSESATPESGPGSEPATSGSETP

SEQ ID NO: 313 - protein, 36 aa, Artificial Sequence; identical to SEQ ID NO: 312
  Description of Artificial Sequence: Synthetic polypeptide

SEQ ID NO: 314 - protein, 36 aa, Artificial Sequence
  Description of Artificial Sequence: Synthetic polypeptide
GSEPATSGSETPGSEPATSGSETPGTSTEPSEGSAP

SEQ ID NO: 315 - protein, 36 aa, Artificial Sequence
  Description of Artificial Sequence: Synthetic polypeptide
GTSESATPESGPGSEPATSGSETPGSEPATSGSETP

SEQ ID NO: 316 - protein, 36 aa, Artificial Sequence
  Description of Artificial Sequence: Synthetic polypeptide
GTSTEPSEGSAPGTSTEPSEGSAPGTSESATPESGP

SEQ ID NO: 317 - protein, 36 aa, Artificial Sequence
  Description of Artificial Sequence: Synthetic polypeptide
GSEPATSGSETPGTSESATPESGPGTSESATPESGP

SEQ ID NO: 318 - protein, 36 aa, Artificial Sequence; identical to SEQ ID NO: 314
  Description of Artificial Sequence: Synthetic polypeptide

SEQ ID NO: 319 - protein, 36 aa, Artificial Sequence
  Description of Artificial Sequence: Synthetic polypeptide
GSEPATSGSETPGTSTEPSEGSAPGSEPATSGSETP

SEQ ID NO: 320 - protein, 36 aa, Artificial Sequence
  Description of Artificial Sequence: Synthetic polypeptide
GTSTEPSEGSAPGTSTEPSEGSAPGSEPATSGSETP

SEQ ID NO: 321 - protein, 36 aa, Artificial Sequence; identical to SEQ ID NO: 300
  Description of Artificial Sequence: Synthetic polypeptide

SEQ ID NO: 322 - protein, 36 aa, Artificial Sequence; identical to SEQ ID NO: 298
  Description of Artificial Sequence: Synthetic polypeptide

SEQ ID NO: 323 - protein, 36 aa, Artificial Sequence
  Description of Artificial Sequence: Synthetic polypeptide
GTSESATPESGPGSEPATSGSETPGTSESATPESGP

SEQ ID NO: 324 - DNA, 108 bp, Artificial Sequence
  Description of Artificial Sequence: Synthetic polynucleotide
ggtagcccggcaggctctccgacctctactgaggaaggtacttctgaaagcgcaaccccggagtccggcccaggtacctctaccgaaccgtctgagggcagcgcacca

SEQ ID NO: 325 - DNA, 108 bp, Artificial Sequence
  Description of Artificial Sequence: Synthetic polynucleotide
ggtacttctaccgaaccgtccgaaggcagcgctccaggtacctctactgaaccttccgagggcagcgctccaggtacctctaccgaaccttctgaaggtagcgcacca

SEQ ID NO: 326 - DNA, 108 bp, Artificial Sequence
  Description of Artificial Sequence: Synthetic polynucleotide
ggtacctctaccgaaccgtctgaaggtagcgcaccaggtacctctgaaagcgcaactcctgagtccggtccaggtacttctgaaagcgcaaccccggagtctggccca

SEQ ID NO: 327 - DNA, 108 bp, Artificial Sequence
  Description of Artificial Sequence: Synthetic polynucleotide
ggtacttctactgaaccgtctgaaggtagcgcaccaggtacttctgaaagcgcaaccccggaatccggcccaggtacctctgaaagcgcaaccccggagtccggccca

SEQ ID NO: 328 - DNA, 108 bp, Artificial Sequence
  Description of Artificial Sequence: Synthetic polynucleotide
ggtagcgaaccggcaacctccggctctgaaaccccaggtacctctgaaagcgctactcctgaatccggcccaggtagcccggcaggttctccgacttccactgaggaa

SEQ ID NO: 329 - DNA, 108 bp, Artificial Sequence
  Description of Artificial Sequence: Synthetic polynucleotide
ggtacttctgaaagcgcaacccctgaatccggtccaggtagcgaaccggctacttctggctctgagactccaggtacttctaccgaaccgtccgaaggtagcgcacca

SEQ ID NO: 330 - DNA, 108 bp, Artificial Sequence
  Description of Artificial Sequence: Synthetic polynucleotide
ggtagcccggctggctctccaacctccactgaggaaggtagcccggctggctctccaacctccactgaagaaggtagcgaaccggctacctccggctctgaaactcca

SEQ ID NO: 331 - DNA, 108 bp, Artificial Sequence
  Description of Artificial Sequence: Synthetic polynucleotide
ggtagcccggctggctctcctacctctactgaggaaggtacttctgaaagcgctactcctgagtctggtccaggtacctctactgaaccgtccgaaggtagcgctcca

SEQ ID NO: 332 - DNA, 108 bp, Artificial Sequence
  Description of Artificial Sequence: Synthetic polynucleotide
ggtagccctgctggctctccgacttctactgaggaaggtagcccggctggttctccgacttctactgaggaaggtacttctaccgaaccttccgaaggtagcgctcca

SEQ ID NO: 333 - DNA, 108 bp, Artificial Sequence
  Description of Artificial Sequence: Synthetic polynucleotide
ggtacttctgaaagcgctactccggagtccggtccaggtacctctaccgaaccgtccgaaggcagcgctccaggtacttctactgaaccttctgagggtagcgctcca

SEQ ID NO: 334 - DNA, 108 bp, Artificial Sequence
  Description of Artificial Sequence: Synthetic polynucleotide
ggtacctctaccgaaccttccgaaggtagcgctccaggtagcccggcaggttctcctacttccactgaggaaggtacttctaccgaaccttctgagggtagcgcacca

SEQ ID NO: 335 - DNA, 108 bp, Artificial Sequence
  Description of Artificial Sequence: Synthetic polynucleotide
ggtagcgaaccggctacttccggctctgagactccaggtagccctgctggctctccgacctctaccgaagaaggtacctctgaaagcgctacccctgagtctggccca

SEQ ID NO: 336 - DNA, 108 bp, Artificial Sequence
  Description of Artificial Sequence: Synthetic polynucleotide
ggtacttctaccgaaccttccgagggcagcgcaccaggtacttctgaaagcgctacccctgagtccggcccaggtacttctgaaagcgctactcctgaatccggtcca

SEQ ID NO: 337 - DNA, 108 bp, Artificial Sequence
  Description of Artificial Sequence: Synthetic polynucleotide
ggtacttctactgaaccgtctgaaggcagcgcaccaggtagcgaaccggctacttccggttctgaaaccccaggtagcccagcaggttctccaacttctactgaagaa

SEQ ID NO: 338 - DNA, 108 bp, Artificial Sequence
  Description of Artificial Sequence: Synthetic polynucleotide
ggtagccctgctggctctccaacctccaccgaagaaggtacctctgaaagcgcaacccctgaatccggcccaggtagcgaaccggcaacctccggttctgaaacccca

SEQ ID NO: 339 - DNA, 108 bp, Artificial Sequence
  Description of Artificial Sequence: Synthetic polynucleotide
ggtacttctgaaagcgctactcctgagtccggcccaggtagcccggctggctctccgacttccaccgaggaaggtagcccggctggctctccaacttctactgaagaa

SEQ ID NO: 340 - DNA, 108 bp, Artificial Sequence
  Description of Artificial Sequence: Synthetic polynucleotide
ggtacctctactgaaccttctgagggcagcgctccaggtacttctgaaagcgctaccccggagtccggtccaggtacttctactgaaccgtccgaaggtagcgcacca

SEQ ID NO: 341 - DNA, 108 bp, Artificial Sequence
  Description of Artificial Sequence: Synthetic polynucleotide
ggtagcccggcaggctctccgacttccaccgaggaaggtacctctactgaaccttctgagggtagcgctccaggtagcgaaccggcaacctctggctctgaaacccca

SEQ ID NO: 342 - DNA, 108 bp, Artificial Sequence
  Description of Artificial Sequence: Synthetic polynucleotide
ggtagcccagcaggctctccgacttccactgaggaaggtacttctactgaaccttccgaaggcagcgcaccaggtacctctactgaaccttctgagggcagcgctcca

SEQ ID NO: 343 - DNA, 108 bp, Artificial Sequence
  Description of Artificial Sequence: Synthetic polynucleotide
ggtagcgaacctgctacctccggttctgaaaccccaggtacctctgaaagcgcaactccggagtctggtccaggtagccctgcaggttctcctacctccactgaggaa

SEQ ID NO: 344 - DNA, 108 bp, Artificial Sequence
  Description of Artificial Sequence: Synthetic polynucleotide
ggtacctctgaaagcgctactccggagtctggcccaggtacctctactgaaccgtctgagggtagcgctccaggtacttctactgaaccgtccgaaggtagcgcacca

SEQ ID NO: 345 - DNA, 108 bp, Artificial Sequence
  Description of Artificial Sequence: Synthetic polynucleotide
ggtagcccggctggttctccgacttccaccgaggaaggtacctctactgaaccttctgagggtagcgctccaggtacctctactgaaccttccgaaggcagcgctcca

SEQ ID NO: 346 - DNA, 108 bp, Artificial Sequence
  Description of Artificial Sequence: Synthetic polynucleotide
ggtacttctaccgaaccgtccgagggcagcgctccaggtacttctactgaaccttctgaaggcagcgctccaggtacttctactgaaccttccgaaggtagcgcacca

SEQ ID NO: 347 - DNA, 108 bp, Artificial Sequence
  Description of Artificial Sequence: Synthetic polynucleotide
ggtagcgaacctgcaacctctggctctgaaaccccaggtacctctgaaagcgctactcctgaatctggcccaggtacttctactgaaccgtccgagggcagcgcacca

SEQ ID NO: 348 - DNA, 108 bp, Artificial Sequence
  Description of Artificial Sequence: Synthetic polynucleotide
ggtacttctaccgaaccgtccgagggtagcgcaccaggtagcccagcaggttctcctacctccaccgaggaaggtacttctaccgaaccgtccgagggtagcgcacca

SEQ ID NO: 349 - DNA, 108 bp, Artificial Sequence
  Description of Artificial Sequence: Synthetic polynucleotide
ggtagcgaaccggcaacctccggctctgaaactccaggtacttctgaaagcgctactccggaatccggcccaggtagcgaaccggctacttccggctctgaaacccca

SEQ ID NO: 350 - DNA, 108 bp, Artificial Sequence
  Description of Artificial Sequence: Synthetic polynucleotide
ggtagcgaaccggcaacttccggctctgaaaccccaggtacttctgaaagcgctactcctgagtctggcccaggtagcgaacctgctacctctggctctgaaacccca

SEQ ID NO: 351 - DNA, 108 bp, Artificial Sequence
  Description of Artificial Sequence: Synthetic polynucleotide
ggtagcgaaccggcaacctctggctctgaaactccaggtagcgaacctgcaacctccggctctgaaaccccaggtacttctactgaaccttctgagggcagcgcacca

SEQ ID NO: 352 - DNA, 108 bp, Artificial Sequence
  Description of Artificial Sequence: Synthetic polynucleotide
ggtacttctgaaagcgctaccccggaatctggcccaggtagcgaaccggctacttctggttctgaaaccccaggtagcgaaccggctacctccggttctgaaactcca

SEQ ID NO: 353 - DNA, 108 bp, Artificial Sequence
  Description of Artificial Sequence: Synthetic polynucleotide
ggtacctctactgaaccttccgaaggcagcgctccaggtacctctaccgaaccgtccgagggcagcgcaccaggtacttctgaaagcgcaacccctgaatccggtcca

SEQ ID NO: 354 - DNA, 108 bp, Artificial Sequence
  Description of Artificial Sequence: Synthetic polynucleotide
ggtagcgaaccggcaacctctggctctgaaaccccaggtacctctgaaagcgctactccggaatctggtccaggtacttctgaaagcgctactccggaatccggtcca

SEQ ID NO: 355 - DNA, 108 bp, Artificial Sequence
  Description of Artificial Sequence: Synthetic polynucleotide
ggtagcgaacctgctacctccggctctgaaactccaggtagcgaaccggctacttccggttctgaaactccaggtacctctaccgaaccttccgaaggcagcgcacca

SEQ ID NO: 356 - DNA, 108 bp, Artificial Sequence
  Description of Artificial Sequence: Synthetic polynucleotide
ggtagcgaacctgctacttctggttctgaaactccaggtacttctaccgaaccgtccgagggtagcgctccaggtagcgaacctgctacttctggttctgaaactcca

SEQ ID NO: 357 - DNA, 108 bp, Artificial Sequence
  Description of Artificial Sequence: Synthetic polynucleotide
ggtacctctaccgaaccgtccgagggtagcgcaccaggtacctctactgaaccgtctgagggtagcgctccaggtagcgaaccggcaacctccggttctgaaactcca

SEQ ID NO: 358 - DNA, 108 bp, Artificial Sequence
  Description of Artificial Sequence: Synthetic polynucleotide
ggtacttctactgaaccttccgaaggtagcgctccaggtagcgaacctgctacttctggttctgaaaccccaggtagcccggctggctctccgacctccaccgaggaa

SEQ ID NO: 359 - DNA, 108 bp, Artificial Sequence
  Description of Artificial Sequence: Synthetic polynucleotide
ggtagcgaaccggctacttccggctctgagactccaggtagcccagctggttctccaacctctactgaggaaggtacttctgaaagcgctacccctgaatctggtcca

SEQ ID NO: 360 - DNA, 108 bp, Artificial Sequence
  Description of Artificial Sequence: Synthetic polynucleotide
ggtacctctgaaagcgcaactcctgagtctggcccaggtagcgaacctgctacctccggctctgagactccaggtacctctgaaagcgcaaccccggaatctggtcca

SEQ ID NO: 361 - protein, 12 aa, Artificial Sequence
  Description of Artificial Sequence: Synthetic peptide
GSTSESPSGTAP

SEQ ID NO: 362 - protein, 12 aa, Artificial Sequence
  Description of Artificial Sequence: Synthetic peptide
GTSTPESGSASP

SEQ ID NO: 363 - protein, 12 aa, Artificial Sequence
  Description of Artificial Sequence: Synthetic peptide
GTSPSGESSTAP

SEQ ID NO: 364 - protein, 12 aa, Artificial Sequence
  Description of Artificial Sequence: Synthetic peptide
GSTSSTAESPGP

SEQ ID NO: 365 - DNA, 36 bp, Artificial Sequence
  Description of Artificial Sequence: Synthetic oligonucleotide
aggttctacyagcgaatcyccktctggyacygcwcc

SEQ ID NO: 366 - DNA, 36 bp, Artificial Sequence
  Description of Artificial Sequence: Synthetic oligonucleotide
acctggwgcrgtrccagamggrgattcgctrgtaga

SEQ ID NO: 367 - DNA, 36 bp, Artificial Sequence
  Description of Artificial Sequence: Synthetic oligonucleotide
aggtacytctacycckgaaagcggytcygcwtctcc

SEQ ID NO: 368 - DNA, 36 bp, Artificial Sequence
  Description of Artificial Sequence: Synthetic oligonucleotide
acctggagawgcrgarccgctttcmggrgtagargt

SEQ ID NO: 369 - DNA, 36 bp, Artificial Sequence
  Description of Artificial Sequence: Synthetic oligonucleotide
aggtacytcycckagcggygaatcttctacygcwcc

SEQ ID NO: 370 - DNA, 36 bp, Artificial Sequence
  Description of Artificial Sequence: Synthetic oligonucleotide
acctggwgcrgtagaagattcrccgctmggrgargt

SEQ ID NO: 371 - DNA, 36 bp, Artificial Sequence
  Description of Artificial Sequence: Synthetic oligonucleotide
aggttcyacyagctctacygcwgaatctcckggycc

SEQ ID NO: 372 - DNA, 36 bp, Artificial Sequence
  Description of Artificial Sequence: Synthetic oligonucleotide
acctggrccmggagattcwgcrgtagagctrgtrga

SEQ ID NO: 373 - DNA, 24 bp, Artificial Sequence
  Description of Artificial Sequence: Synthetic oligonucleotide
aggttcgtcttcactcgagggtac

SEQ ID NO: 374 - DNA, 16 bp, Artificial Sequence
  Description of Artificial Sequence: Synthetic oligonucleotide
cctcgagtgaagacga

SEQ ID NO: 375 - protein, 36 aa, Artificial Sequence
  Description of Artificial Sequence: Synthetic polypeptide
GTSTPESGSASPGTSPSGESSTAPGTSPSGESSTAP

SEQ ID NO: 376 - protein, 36 aa, Artificial Sequence
  Description of Artificial Sequence: Synthetic polypeptide
GTSPSGESSTAPGSTSSTAESPGPGTSPSGESSTAP

SEQ ID NO: 377 - protein, 36 aa, Artificial Sequence
  Description of Artificial Sequence: Synthetic polypeptide
GSTSSTAESPGPGTSPSGESSTAPGTSTPESGSASP

SEQ ID NO: 378 - protein, 36 aa, Artificial Sequence
  Description of Artificial Sequence: Synthetic polypeptide
GSTSSTAESPGPGSTSSTAESPGPGTSPSGESSTAP

SEQ ID NO: 379 - protein, 36 aa, Artificial Sequence; identical to SEQ ID NO: 377
  Description of Artificial Sequence: Synthetic polypeptide

SEQ ID NO: 380 - protein, 36 aa, Artificial Sequence
  Description of Artificial Sequence: Synthetic polypeptide
GSTSSTAESPGPGTSTPESGSASPGSTSESPSGTAP

SEQ ID NO: 381 - protein, 36 aa, Artificial Sequence
  Description of Artificial Sequence: Synthetic polypeptide
GSTSSTAESPGPGTSTPESGSASPGTSTPESGSASP

SEQ ID NO: 382 - protein, 36 aa, Artificial Sequence
  Description of Artificial Sequence: Synthetic polypeptide
GSTSESPSGTAPGTSPSGESSTAPGSTSESPSGTAP

SEQ ID NO: 383 - protein, 36 aa, Artificial Sequence; identical to SEQ ID NO: 378
  Description of Artificial Sequence: Synthetic polypeptide

SEQ ID NO: 384 - protein, 36 aa, Artificial Sequence; identical to SEQ ID NO: 380
  Description of Artificial Sequence: Synthetic polypeptide

SEQ ID NO: 385 - protein, 36 aa, Artificial Sequence; identical to SEQ ID NO: 378
  Description of Artificial Sequence: Synthetic polypeptide

SEQ ID NO: 386 - protein, 36 aa, Artificial Sequence
  Description of Artificial Sequence: Synthetic polypeptide
GSTSSTAESPGPGSTSESPSGTAPGSTSSTAESPGP

SEQ ID NO: 387 - protein, 36 aa, Artificial Sequence
  Description of Artificial Sequence: Synthetic polypeptide
GSTSSTAESPGPGSTSSTAESPGPGSTSSTAESPGP

SEQ ID NO: 388 - protein, 36 aa, Artificial Sequence
  Description of Artificial Sequence: Synthetic polypeptide
GSTSESPSGTAPGSTSSTAESPGPGSTSSTAESPGP

SEQ ID NO: 389 - protein, 36 aa, Artificial Sequence
  Description of Artificial Sequence: Synthetic polypeptide
GSTSESPSGTAPGSTSESPSGTAPGSTSESPSGTAP

SEQ ID NO: 390 - protein, 36 aa, Artificial Sequence; identical to SEQ ID NO: 387
  Description of Artificial Sequence: Synthetic polypeptide

SEQ ID NO: 391 - protein, 36 aa, Artificial Sequence; identical to SEQ ID NO: 378
  Description of Artificial Sequence: Synthetic polypeptide

SEQ ID NO: 392 - protein, 36 aa, Artificial Sequence
  Description of Artificial Sequence: Synthetic polypeptide
GSSPSASTGTGPGSSTPSGATGSPGSSTPSGATGSP

SEQ ID NO: 393 - protein, 36 aa, Artificial Sequence
  Description of Artificial Sequence: Synthetic polypeptide
GTSPSGESSTAPGTSTPESGSASPGSTSSTAESPGP

SEQ ID NO: 394 - protein, 36 aa, Artificial Sequence
  Description of Artificial Sequence: Synthetic polypeptide
GSTSSTAESPGPGSTSSTAESPGPGTSTPESGSASP

SEQ ID NO: 395 - protein, 36 aa, Artificial Sequence
  Description of Artificial Sequence: Synthetic polypeptide
GTSPSGESSTAPGSTSSTAESPGPGTSTPESGSASP

SEQ ID NO: 396 - protein, 36 aa, Artificial Sequence; identical to SEQ ID NO: 388
  Description of Artificial Sequence: Synthetic polypeptide

SEQ ID NO: 397 - protein, 36 aa, Artificial Sequence; identical to SEQ ID NO: 386
  Description of Artificial Sequence: Synthetic polypeptide

SEQ ID NO: 398 - protein, 36 aa, Artificial Sequence; identical to SEQ ID NO: 377
  Description of Artificial Sequence: Synthetic polypeptide

SEQ ID NO: 399 - protein, 36 aa, Artificial Sequence
  Description of Artificial Sequence: Synthetic polypeptide
GSTSESPSGTAPGSTSESPSGTAPGTSPSGESSTAP

SEQ ID NO: 400 - protein, 36 aa, Artificial Sequence
  Description of Artificial Sequence: Synthetic polypeptide
GSTSESPSGTAPGSTSESPSGTAPGTSTPESGSASP

SEQ ID NO: 401 - protein, 36 aa, Artificial Sequence
  Description of Artificial Sequence: Synthetic polypeptide
GTSTPESGSASPGSTSSTAESPGPGSTSSTAESPGP

SEQ ID NO: 402 - protein, 36 aa, Artificial Sequence; identical to SEQ ID NO: 399
  Description of Artificial Sequence: Synthetic polypeptide

SEQ ID NO: 403 - protein, 36 aa, Artificial Sequence
  Description of Artificial Sequence: Synthetic polypeptide
GSTSSTAESPGPGSTSSTAESPGPGSTSESPSGTAP

SEQ ID NO: 404 - protein, 36 aa, Artificial Sequence; identical to SEQ ID NO: 394
  Description of Artificial Sequence: Synthetic polypeptide

SEQ ID NO: 405 - protein, 36 aa, Artificial Sequence; identical to SEQ ID NO: 403
  Description of Artificial Sequence: Synthetic polypeptide

SEQ ID NO: 406 - protein, 36 aa, Artificial Sequence
  Description of Artificial Sequence: Synthetic polypeptide
GTSPSGESSTAPGSTSESPSGTAPGSTSSTAESPGP

SEQ ID NO: 407 - protein, 36 aa, Artificial Sequence
  Description of Artificial Sequence: Synthetic polypeptide
GSTSESPSGTAPGTSPSGESSTAPGSTSSTAESPGP

SEQ ID NO: 408 - protein, 36 aa, Artificial Sequence
  Description of Artificial Sequence: Synthetic polypeptide
GSTSSTAESPGPGSTSESPSGTAPGTSPSGESSTAP

SEQ ID NO: 409 - protein, 36 aa, Artificial Sequence; identical to SEQ ID NO: 400
  Description of Artificial Sequence: Synthetic polypeptide

SEQ ID NO: 410 - protein, 36 aa, Artificial Sequence
  Description of Artificial Sequence: Synthetic polypeptide
GTSTPESGSASPGSTSESPSGTAPGSTSSTAESPGP

SEQ ID NO: 411 - protein, 36 aa, Artificial Sequence
  Description of Artificial Sequence: Synthetic polypeptide
GSTSSTAESPGPGTSPSGESSTAPGTSPSGESSTAP

SEQ ID NO: 412 - protein, 36 aa, Artificial Sequence
  Description of Artificial Sequence: Synthetic polypeptide
GTSPSGESSTAPGTSPSGESSTAPGTSPSGESSTAP

SEQ ID NO: 413 - protein, 36 aa, Artificial Sequence; identical to SEQ ID NO: 380
  Description of Artificial Sequence: Synthetic polypeptide

SEQ ID NO: 414 - protein, 36 aa, Artificial Sequence
  Description of Artificial Sequence: Synthetic polypeptide
GSTSESPSGTAPGTSPSGESSTAPGTSPSGESSTAP

SEQ ID NO: 415 - protein, 36 aa, Artificial Sequence
  Description of Artificial Sequence: Synthetic polypeptide
GSTSESPSGTAPGTSTPESGSASPGSTSSTAESPGP

SEQ ID NO: 416 - protein, 36 aa, Artificial Sequence; identical to SEQ ID NO: 403
  Description of Artificial Sequence: Synthetic polypeptide

SEQ ID NO: 417 - protein, 36 aa, Artificial Sequence
  Description of Artificial Sequence: Synthetic polypeptide
GSTSESPSGTAPGTSTPESGSASPGTSTPESGSASP

SEQ ID NO: 418 - protein, 36 aa, Artificial Sequence; identical to SEQ ID NO: 417
  Description of Artificial Sequence: Synthetic polypeptide

SEQ ID NO: 419 - DNA, 108 bp, Artificial Sequence
  Description of Artificial Sequence: Synthetic polynucleotide
ggtacttctactccggaaagcggttccgcatctccaggtacttctcctagcggtgaatcttctactgctccaggtacctctcctagcggcgaatcttctactgctcca

SEQ ID NO: 420 - DNA, 108 bp, Artificial Sequence
  Description of Artificial Sequence: Synthetic polynucleotide
ggtacttctccgagcggtgaatcttctaccgcaccaggttctactagctctaccgctgaatctccgggcccaggtacttctccgagcggtgaatcttctactgctcca

SEQ ID NO: 421 - DNA, 108 bp, Artificial Sequence
  Description of Artificial Sequence: Synthetic polynucleotide
ggttccaccagctctactgctgaatctcctggtccaggtacctctcctagcggtgaatcttctactgctccaggtacttctactcctgaaagcggctctgcttctcca

SEQ ID NO: 422 - DNA, 108 bp, Artificial Sequence
  Description of Artificial Sequence: Synthetic polynucleotide
ggttctaccagctctactgcagaatctcctggcccaggttccaccagctctaccgcagaatctccgggtccaggtacttcccctagcggtgaatcttctaccgcacca

SEQ ID NO: 423 - DNA, 108 bp, Artificial Sequence
  Description of Artificial Sequence: Synthetic polynucleotide
ggttctactagctctactgctgaatctcctggcccaggtacttctcctagcggtgaatcttctaccgctccaggtacctctactccggaaagcggttctgcatctcca

SEQ ID NO: 424 - DNA, 108 bp, Artificial Sequence
  Description of Artificial Sequence: Synthetic polynucleotide
ggttctaccagctctaccgcagaatctcctggtccaggtacctctactccggaaagcggctctgcatctccaggttctactagcgaatctccttctggcactgcacca

SEQ ID NO: 425 - DNA, 108 bp, Artificial Sequence
  Description of Artificial Sequence: Synthetic polynucleotide
ggttctactagctctactgcagaatctcctggcccaggtacctctactccggaaagcggctctgcatctccaggtacttctacccctgaaagcggttctgcatctcca

SEQ ID NO: 426 - DNA, 108 bp, Artificial Sequence
  Description of Artificial Sequence: Synthetic polynucleotide
ggttctaccagcgaatctccttctggcaccgctccaggtacctctcctagcggcgaatcttctaccgctccaggttctactagcgaatctccttctggcactgcacca

SEQ ID NO: 427 - DNA, 108 bp, Artificial Sequence
  Description of Artificial Sequence: Synthetic polynucleotide
ggttccaccagctctactgcagaatctccgggcccaggttctactagctctactgcagaatctccgggtccaggtacttctcctagcggcgaatcttctaccgctcca

SEQ ID NO: 428 - DNA, 108 bp, Artificial Sequence
  Description of Artificial Sequence: Synthetic polynucleotide
ggttccactagctctactgcagaatctcctggcccaggtacctctacccctgaaagcggctctgcatctccaggttctaccagcgaatccccgtctggcaccgcacca

SEQ ID NO: 429 - DNA, 108 bp, Artificial Sequence
  Description of Artificial Sequence: Synthetic polynucleotide
ggttctactagctctactgctgaatctccgggtccaggttctaccagctctactgctgaatctcctggtccaggtacctccccgagcggtgaatcttctactgcacca

SEQ ID NO: 430 - DNA, 108 bp, Artificial Sequence
  Description of Artificial Sequence: Synthetic polynucleotide
ggttctaccagctctaccgctgaatctcctggcccaggttctaccagcgaatccccgtctggcaccgcaccaggttctactagctctaccgctgaatctccgggtcca

SEQ ID NO: 431 - DNA, 108 bp, Artificial Sequence
  Description of Artificial Sequence: Synthetic polynucleotide
ggttctaccagctctaccgcagaatctcctggcccaggttccactagctctaccgctgaatctcctggtccaggttctactagctctaccgctgaatctcctggtcca

SEQ ID NO: 432 - DNA, 108 bp, Artificial Sequence
  Description of Artificial Sequence: Synthetic polynucleotide
ggttctactagcgaatccccttctggtactgctccaggttccactagctctaccgctgaatctcctggcccaggttccactagctctactgcagaatctcctggtcca

SEQ ID NO: 433 - DNA, 108 bp, Artificial Sequence
  Description of Artificial Sequence: Synthetic polynucleotide
ggttctactagcgaatctccttctggtaccgctccaggttctaccagcgaatccccgtctggtactgctccaggttctaccagcgaatctccttctggtactgcacca

SEQ ID NO: 434 - DNA, 108 bp, Artificial Sequence
  Description of Artificial Sequence: Synthetic polynucleotide
ggttccaccagctctactgctgaatctcctggcccaggttctaccagctctactgctgaatctccgggcccaggttccaccagctctaccgctgaatctccgggtcca

SEQ ID NO: 435 - DNA, 108 bp, Artificial Sequence
  Description of Artificial Sequence: Synthetic polynucleotide
ggttccactagctctaccgcagaatctcctggtccaggttctactagctctactgctgaatctccgggtccaggtacctcccctagcggcgaatcttctaccgctcca

SEQ ID NO: 436 - DNA, 108 bp, Artificial Sequence
  Description of Artificial Sequence: Synthetic polynucleotide
ggttctagcccttctgcttccaccggtaccggcccaggtagctctactccgtctggtgcaactggctctccaggtagctctactccgtctggtgcaaccggctcccca

SEQ ID NO: 437 - DNA, 108 bp, Artificial Sequence
  Description of Artificial Sequence: Synthetic polynucleotide
ggtacttcccctagcggtgaatcttctactgctccaggtacctctactccggaaagcggctccgcatctccaggttctactagctctactgctgaatctcctggtcca

SEQ ID NO: 438 - DNA, 108 bp, Artificial Sequence
  Description of Artificial Sequence: Synthetic polynucleotide
ggttctactagctctaccgctgaatctccgggtccaggttctaccagctctactgcagaatctcctggcccaggtacttctactccggaaagcggttccgcttctcca

SEQ ID NO: 439 - DNA, 108 bp, Artificial Sequence
  Description of Artificial Sequence: Synthetic polynucleotide
ggtacttctcctagcggtgaatcttctaccgctccaggttctaccagctctactgctgaatctcctggcccaggtacttctaccccggaaagcggctccgcttctcca

SEQ ID NO: 440 - DNA, 108 bp, Artificial Sequence
  Description of Artificial Sequence: Synthetic polynucleotide
ggttctactagcgaatccccttctggtactgcaccaggttctaccagctctactgctgaatctccgggcccaggttccaccagctctaccgcagaatctcctggtcca

SEQ ID NO: 441 - DNA, 108 bp, Artificial Sequence
  Description of Artificial Sequence: Synthetic polynucleotide
ggttccaccagctctaccgctgaatctccgggcccaggttctaccagcgaatccccttctggcactgcaccaggttctactagctctaccgcagaatctccgggccca

SEQ ID NO: 442 - DNA, 108 bp, Artificial Sequence
  Description of Artificial Sequence: Synthetic polynucleotide
ggttctaccagctctactgctgaatctccgggtccaggtacttccccgagcggtgaatcttctactgcaccaggtacttctactccggaaagcggttccgcttctcca

SEQ ID NO: 443 - DNA, 108 bp, Artificial Sequence
  Description of Artificial Sequence: Synthetic polynucleotide
ggttctaccagcgaatctccttctggcaccgctccaggttctactagcgaatccccgtctggtaccgcaccaggtacttctcctagcggcgaatcttctaccgcacca

SEQ ID NO: 444 - DNA, 108 bp, Artificial Sequence
  Description of Artificial Sequence: Synthetic polynucleotide
ggttctaccagcgaatccccttctggtactgctccaggttctaccagcgaatccccttctggcaccgcaccaggtacttctacccctgaaagcggctccgcttctcca

SEQ ID NO: 445 - DNA, 108 bp, Artificial Sequence
  Description of Artificial Sequence: Synthetic polynucleotide
ggtacctctactcctgaaagcggttctgcatctccaggttccactagctctaccgcagaatctccgggcccaggttctactagctctactgctgaatctcctggccca

SEQ ID NO: 446 - DNA, 108 bp, Artificial Sequence
  Description of Artificial Sequence: Synthetic polynucleotide
ggttctaccagcgaatccccttctggcactgcaccaggttctactagcgaatccccttctggtaccgcaccaggtacttctccgagcggcgaatcttctactgctcca

SEQ ID NO: 447 - DNA, 108 bp, Artificial Sequence
  Description of Artificial Sequence: Synthetic polynucleotide
ggttctactagctctaccgctgaatctcctggcccaggttccactagctctaccgcagaatctccgggcccaggttctactagcgaatccccttctggtaccgctcca

SEQ ID NO: 448 - DNA, 108 bp, Artificial Sequence
  Description of Artificial Sequence: Synthetic polynucleotide
ggttccaccagctctactgcagaatctcctggcccaggttctactagctctaccgcagaatctcctggtccaggtacctctactcctgaaagcggttccgcatctcca

SEQ ID NO: 449 - DNA, 108 bp, Artificial Sequence
  Description of Artificial Sequence: Synthetic polynucleotide
ggttctactagctctactgctgaatctccgggcccaggttctactagctctaccgctgaatctccgggtccaggttctactagcgaatctccttctggtaccgctcca

SEQ ID NO: 450 - DNA, 108 bp, Artificial Sequence
  Description of Artificial Sequence: Synthetic polynucleotide
ggtacctccccgagcggtgaatcttctactgcaccaggttctactagcgaatccccttctggtactgctccaggttccaccagctctactgcagaatctccgggtcca

SEQ ID NO: 451 - DNA, 108 bp, Artificial Sequence
  Description of Artificial Sequence: Synthetic polynucleotide
ggttctactagcgaatccccgtctggtactgctccaggtacttcccctagcggtgaatcttctactgctccaggttctaccagctctaccgcagaatctccgggtcca

SEQ ID NO: 452 - DNA, 108 bp, Artificial Sequence
  Description of Artificial Sequence: Synthetic polynucleotide
ggttctaccagctctaccgctgaatctcctggcccaggttctactagcgaatctccgtctggcaccgcaccaggtacttcccctagcggtgaatcttctactgcacca

SEQ ID NO: 453 - DNA, 108 bp, Artificial Sequence
  Description of Artificial Sequence: Synthetic polynucleotide
ggttctactagcgaatctccttctggcactgcaccaggttctaccagcgaatctccgtctggcactgcaccaggtacctctacccctgaaagcggttccgcttctcca

SEQ ID NO: 454 - DNA, 108 bp, Artificial Sequence
  Description of Artificial Sequence: Synthetic polynucleotide
ggtacctctactccggaaagcggttccgcatctccaggttctaccagcgaatccccgtctggcaccgcaccaggttctactagctctactgctgaatctccgggccca

SEQ ID NO: 455 - DNA, 108 bp, Artificial Sequence
  Description of Artificial Sequence: Synthetic polynucleotide
ggttctactagctctactgcagaatctccgggcccaggtacctctcctagcggtgaatcttctaccgctccaggtacttctccgagcggtgaatcttctaccgctcca

SEQ ID NO: 456 - DNA, 108 bp, Artificial Sequence
  Description of Artificial Sequence: Synthetic polynucleotide
ggtacctcccctagcggcgaatcttctactgctccaggtacctctcctagcggcgaatcttctaccgctccaggtacctcccctagcggtgaatcttctaccgcacca

SEQ ID NO: 457 - DNA, 108 bp, Artificial Sequence
  Description of Artificial Sequence: Synthetic polynucleotide
ggttccactagctctactgctgaatctcctggcccaggtacttctactccggaaagcggttccgcttctccaggttctactagcgaatctccgtctggcaccgcacca

SEQ ID NO: 458 - DNA, 108 bp, Artificial Sequence
  Description of Artificial Sequence: Synthetic polynucleotide
ggttctactagcgaatctccgtctggcactgctccaggtacttctcctagcggtgaatcttctaccgctccaggtacttcccctagcggcgaatcttctaccgctcca

SEQ ID NO: 459 - DNA, 108 bp, Artificial Sequence
  Description of Artificial Sequence: Synthetic polynucleotide
ggttctactagcgaatctccttctggtaccgctccaggtacttctacccctgaaagcggctccgcttctccaggttccactagctctaccgctgaatctccgggtcca

SEQ ID NO: 460 - DNA, 108 bp, Artificial Sequence
  Description of Artificial Sequence: Synthetic polynucleotide
ggttccactagctctactgctgaatctcctggcccaggttctaccagctctaccgctgaatctcctggcccaggttctaccagcgaatctccgtctggcaccgcacca

SEQ ID NO: 461 - DNA, 108 bp, Artificial Sequence
  Description of Artificial Sequence: Synthetic polynucleotide
ggttctactagcgaatccccgtctggtaccgcaccaggtacttctaccccggaaagcggctctgcttctccaggtacttctaccccggaaagcggctccgcatctcca

SEQ ID NO: 462 - DNA, 108 bp, Artificial Sequence
  Description of Artificial Sequence: Synthetic polynucleotide
ggttctactagcgaatccccgtctggtactgctccaggtacttctactcctgaaagcggttccgcttctccaggtacctctactccggaaagcggttctgcatctcca

SEQ ID NO: 463 - protein, 12 aa, Artificial Sequence
  Description of Artificial Sequence: Synthetic peptide
GTPGSGTASSSP

SEQ ID NO: 464 - protein, 12 aa, Artificial Sequence
  Description of Artificial Sequence: Synthetic peptide
GSSTPSGATGSP

SEQ ID NO: 465 - protein, 12 aa, Artificial Sequence
  Description of Artificial Sequence: Synthetic peptide
GSSPSASTGTGP

SEQ ID NO: 466 - protein, 12 aa, Artificial Sequence
  Description of Artificial Sequence: Synthetic peptide
GASPGTSSTGSP

SEQ ID NO: 467 - DNA, 36 bp, Artificial Sequence
  Description of Artificial Sequence: Synthetic oligonucleotide
aggtacycckggyagcggtacygcwtcttcytctcc

SEQ ID NO: 468 - DNA, 36 bp, Artificial Sequence
  Description of Artificial Sequence: Synthetic oligonucleotide
acctggagargaagawgcrgtaccgctrccmggrgt

SEQ ID NO: 469 - DNA, 36 bp, Artificial Sequence
  Description of Artificial Sequence: Synthetic oligonucleotide
aggtagctctacyccktctggtgcwacyggytcycc

SEQ ID NO: 470 - DNA, 36 bp, Artificial Sequence
  Description of Artificial Sequence: Synthetic oligonucleotide
acctggrgarccrgtwgcaccagamggrgtagagct

SEQ ID NO: 471 - DNA, 36 bp, Artificial Sequence
  Description of Artificial Sequence: Synthetic oligonucleotide
aggttctagcccktctgcwtcyacyggtacyggycc

SEQ ID NO: 472 - DNA, 36 bp, Artificial Sequence
  Description of Artificial Sequence: Synthetic oligonucleotide
acctggrccrgtaccrgtrgawgcagamgggctaga

SEQ ID NO: 473 - DNA, 36 bp, Artificial Sequence
  Description of Artificial Sequence: Synthetic oligonucleotide
aggtgcwtcycckggyacyagctctacyggttctcc

SEQ ID NO: 474 - DNA, 36 bp, Artificial Sequence
  Description of Artificial Sequence: Synthetic oligonucleotide
acctggagaaccrgtagagctrgtrccmggrgawgc

SEQ ID NO: 475 - DNA, 24 bp, Artificial Sequence
  Description of Artificial Sequence: Synthetic oligonucleotide
aggttcgtcttcactcgagggtac

SEQ ID NO: 476 - DNA, 16 bp, Artificial Sequence
  Description of Artificial Sequence: Synthetic oligonucleotide
cctcgagtgaagacga

SEQ ID NO: 477 - protein, 36 aa, Artificial Sequence
  Description of Artificial Sequence: Synthetic polypeptide
GASPGTSSTGSPGTPGSGTASSSPGSSTPSGATGSP

SEQ ID NO: 478 - protein, 36 aa, Artificial Sequence
  Description of Artificial Sequence: Synthetic polypeptide
GSSTPSGATGSPGSSPSASTGTGPGSSTPSGATGSP

SEQ ID NO: 479 - protein, 36 aa, Artificial Sequence
  Description of Artificial Sequence: Synthetic polypeptide
GASPGTSSTGSPGSSPSASTGTGPGSSTPSGATGSP

SEQ ID NO: 480 - protein, 36 aa, Artificial Sequence
  Description of Artificial Sequence: Synthetic polypeptide
GTPGSGTASSSPGSSTPSGATGSPGASPGTSSTGSP

SEQ ID NO: 481 - protein, 36 aa, Artificial Sequence
  Description of Artificial Sequence: Synthetic polypeptide
GTPGSGTASSSPGASPGTSSTGSPGSRPSASTGTGP

SEQ ID NO: 482 - protein, 36 aa, Artificial Sequence
  Description of Artificial Sequence: Synthetic polypeptide
GASPGTSSTGSPGSSTPSGATGSPGASPGTSSTGSP

SEQ ID NO: 483 - protein, 36 aa, Artificial Sequence
  Description of Artificial Sequence: Synthetic polypeptide
GTPGSGTASSSPGSSTPSGATGSPGSSTPSGATGSP

SEQ ID NO: 484 - protein, 36 aa, Artificial Sequence
  Description of Artificial Sequence: Synthetic polypeptide
GASPGTSSTGSPGASPGTSSTGSPGASPGTSSTGSP

SEQ ID NO: 485 - protein, 36 aa, Artificial Sequence
  Description of Artificial Sequence: Synthetic polypeptide
GSSTPSGATGSPGSSPSASTGTGPGASPGTSSTGSP

SEQ ID NO: 486 - protein, 36 aa, Artificial Sequence
  Description of Artificial Sequence: Synthetic polypeptide
GSSTPSGATGSPGSSTPSGATGSPGTPGSGTASSSP

SEQ ID NO: 487 - protein, 36 aa, Artificial Sequence
  Description of Artificial Sequence: Synthetic polypeptide
GSSTPSGATGSPGSSTPSGATGSPGASPGTSSTGSP

SEQ ID NO: 488 - protein, 36 aa, Artificial Sequence
  Description of Artificial Sequence: Synthetic polypeptide
GTPGSGTASSSPGSSPSASTGTGPGSSTPSGATGSP

SEQ ID NO: 489 - protein, 36 aa, Artificial Sequence
  Description of Artificial Sequence: Synthetic polypeptide
GASPGTSSTGSPGSSPSASTGTGPGTPGSGTASSSP

SEQ ID NO: 490 - protein, 36 aa, Artificial Sequence; identical to SEQ ID NO: 487
  Description of Artificial Sequence: Synthetic polypeptide

SEQ ID NO: 491 - protein, 36 aa, Artificial Sequence
  Description of Artificial Sequence: Synthetic polypeptide
GTPGSGTASSSPGSSTPSGATGSPGSSPSASTGTGP

SEQ ID NO: 492 - protein, 36 aa, Artificial Sequence
  Description of Artificial Sequence: Synthetic polypeptide
GSSTPSGATGSPGTPGSGTASSSPGTPGSGTASSSP

SEQ ID NO: 493 - protein, 36 aa, Artificial Sequence; identical to SEQ ID NO: 480
  Description of Artificial Sequence: Synthetic polypeptide

SEQ ID NO: 494 - protein, 36 aa, Artificial Sequence; identical to SEQ ID NO: 487
  Description of Artificial Sequence: Synthetic polypeptide

SEQ ID NO: 495 - protein, 36 aa, Artificial Sequence; identical to SEQ ID NO: 477
  Description of Artificial Sequence: Synthetic polypeptide

SEQ ID NO: 496 - protein, 36 aa, Artificial Sequence
  Description of Artificial Sequence: Synthetic polypeptide
GSSPSASTGTGPGSSTPSGATGSPGTPGSGTASSSP

SEQ ID NO: 497 - protein, 36 aa, Artificial Sequence; identical to SEQ ID NO: 479
  Description of Artificial Sequence: Synthetic polypeptide

SEQ ID NO: 498 - protein, 36 aa, Artificial Sequence
  Description of Artificial Sequence: Synthetic polypeptide
GASPGTSSTGSPGSSTPSGATGSPGSSTPSGATGSP

SEQ ID NO: 499 - protein, 36 aa, Artificial Sequence
  Description of Artificial Sequence: Synthetic polypeptide
GTPGSGTASSSPGSSTPSGATGSPGTPGSGTASSSP

SEQ ID NO: 500 - protein, 36 aa, Artificial Sequence; identical to SEQ ID NO: 392
  Description of Artificial Sequence: Synthetic polypeptide

SEQ ID NO: 501 - protein, 36 aa, Artificial Sequence
  Description of Artificial Sequence: Synthetic polypeptide
GASPGTSSTGSPGSSPSASTGTGPGSSPSASTGTGP

SEQ ID NO: 502 - protein, 36 aa, Artificial Sequence
  Description of Artificial Sequence: Synthetic polypeptide
GTPGSGTASSSPGASPGTSSTGSPGASPGTSSTGSP

SEQ ID NO: 503 - protein, 36 aa, Artificial Sequence
  Description of Artificial Sequence: Synthetic polypeptide
GSSTPSGATGSPGASPGTSSTGSPGSSTPSGATGSP

SEQ ID NO: 504 - protein, 36 aa, Artificial Sequence
  Description of Artificial Sequence: Synthetic polypeptide
GSSTPSGATGSPGTPGSGTASSSPGSSTPSGATGSP

SEQ ID NO: 505 - protein, 36 aa, Artificial Sequence; identical to SEQ ID NO: 479
  Description of Artificial Sequence: Synthetic polypeptide

SEQ ID NO: 506 - protein, 36 aa, Artificial Sequence
  Description of Artificial Sequence: Synthetic polypeptide
GSSTPSGATGSPGSSTPSGATGSPGSSTPSGATGSP

SEQ ID NO: 507 - protein, 36 aa, Artificial Sequence
  Description of Artificial Sequence: Synthetic polypeptide
GASPGTSSTGSPGTPGSGTASSSPGASPGTSSTGSP

SEQ ID NO: 508 - protein, 36 aa, Artificial Sequence; identical to SEQ ID NO: 485
  Description of Artificial Sequence: Synthetic polypeptide

SEQ ID NO: 509 - protein, 36 aa, Artificial Sequence
  Description of Artificial Sequence: Synthetic polypeptide
GASPGTSSTGSPGSSTPSGATGSPGSSPSASTGTGP

SEQ ID NO: 510 - protein, 36 aa, Artificial Sequence; identical to SEQ ID NO: 480
  Description of Artificial Sequence: Synthetic polypeptide

SEQ ID NO: 511 - protein, 36 aa, Artificial Sequence; identical to SEQ ID NO: 504
  Description of Artificial Sequence: Synthetic polypeptide

SEQ ID NO: 512 - protein, 36 aa, Artificial Sequence
  Description of Artificial Sequence: Synthetic polypeptide
GSSPSASTGTGPGSSPSASTGTGPGASPGTSSTGSP

SEQ ID NO: 513 - protein, 36 aa, Artificial Sequence
  Description of Artificial Sequence: Synthetic polypeptide
GTPGSGTASSSPGSSTPSGATGSPGSNPSASTGTGP

SEQ ID NO: 514 - protein, 36 aa, Artificial Sequence
  Description of Artificial Sequence: Synthetic polypeptide
GSSPSASTGTGPGSSTPSGATGSPGASPGTSSTGSP

SEQ ID NO: 515 - protein, 36 aa, Artificial Sequence
  Description of Artificial Sequence: Synthetic polypeptide
GSSTPSGATGSPGASPGTSSTGSPGTPGSGTASSSP

SEQ ID NO: 516 - protein, 36 aa, Artificial Sequence; identical to SEQ ID NO: 506
  Description of Artificial Sequence: Synthetic polypeptide

SEQ ID NO: 517 - protein, 36 aa, Artificial Sequence; identical to SEQ ID NO: 477
  Description of Artificial Sequence: Synthetic polypeptide

SEQ ID NO: 518 - protein, 36 aa, Artificial Sequence
  Description of Artificial Sequence: Synthetic polypeptide
GSSTPSGATGSPGSSPSASTGTGPGSSPSASTGTGP

SEQ ID NO: 519 - protein, 36 aa, Artificial Sequence; identical to SEQ ID NO: 501
  Description of Artificial Sequence: Synthetic polypeptide

SEQ ID NO: 520 - protein, 36 aa, Artificial Sequence; identical to SEQ ID NO: 489
  Description of Artificial Sequence: Synthetic polypeptide

SEQ ID NO: 521 - DNA, 108 bp, Artificial Sequence
  Description of Artificial Sequence: Synthetic polynucleotide
ggtgcatccccgggcactagctctaccggttctccaggtactcctggtagcggtactgcttcttcttctccaggtagctctactccttctggtgctactggttctcca

SEQ ID NO: 522 - DNA, 108 bp, Artificial Sequence
  Description of Artificial Sequence: Synthetic polynucleotide
ggtagctctaccccttctggtgctaccggctctccaggttctagcccgtctgcttctaccggtaccggtccaggtagctctaccccttctggtgctactggttctcca

SEQ ID NO: 523 - DNA, 108 bp, Artificial Sequence
  Description of Artificial Sequence: Synthetic polynucleotide
ggtgcatctccgggtactagctctaccggttctccaggttctagcccttctgcttccactggtaccggcccaggtagctctaccccgtctggtgctactggttcccca

SEQ ID NO: 524 - DNA, 108 bp, Artificial Sequence
  Description of Artificial Sequence: Synthetic polynucleotide
ggtactccgggcagcggtactgcttcttcctctccaggtagctctaccccttctggtgcaactggttccccaggtgcatcccctggtactagctctaccggttctcca

SEQ ID NO: 525 - DNA, 108 bp, Artificial Sequence
  Description of Artificial Sequence: Synthetic polynucleotide
ggtacccctggcagcggtactgcttcttcttctccaggtgcttcccctggtaccagctctaccggttctccaggttctagaccttctgcatccaccggtactggtcca

SEQ ID NO: 526 - DNA, 108 bp, Artificial Sequence
  Description of Artificial Sequence: Synthetic polynucleotide
ggtgcatctcctggtaccagctctaccggttctccaggtagctctactccttctggtgctactggctctccaggtgcttccccgggtaccagctctaccggttctcca

SEQ ID NO: 527 - DNA, 108 bp, Artificial Sequence
  Description of Artificial Sequence: Synthetic polynucleotide
ggtaccccgggcagcggtaccgcatcttcctctccaggtagctctaccccgtctggtgctaccggttccccaggtagctctaccccgtctggtgcaaccggctcccca

SEQ ID NO: 528 - DNA, 108 bp, Artificial Sequence
  Description of Artificial Sequence: Synthetic polynucleotide
ggtgcatctccgggcactagctctactggttctccaggtgcatcccctggcactagctctactggttctccaggtgcttctcctggtaccagctctactggttctcca

SEQ ID NO: 529 - DNA, 108 bp, Artificial Sequence
  Description of Artificial Sequence: Synthetic polynucleotide
ggtagctctactccgtctggtgcaaccggctccccaggttctagcccgtctgcttccactggtactggcccaggtgcttccccgggcaccagctctactggttctcca

SEQ ID NO: 530 - DNA, 108 bp, Artificial Sequence
  Description of Artificial Sequence: Synthetic polynucleotide
ggtagctctactccttctggtgctaccggttccccaggtagctctactccttctggtgctactggttccccaggtactccgggcagcggtactgcttcttcctctcca

SEQ ID NO: 531 - DNA, 108 bp, Artificial Sequence
  Description of Artificial Sequence: Synthetic polynucleotide
ggtagctctactccgtctggtgcaaccggttccccaggtagctctactccttctggtgctactggctccccaggtgcatcccctggcaccagctctaccggttctcca

SEQ ID NO: 532 - DNA, 108 bp, Artificial Sequence
  Description of Artificial Sequence: Synthetic polynucleotide
ggtactcctggtagcggtaccgcatcttcctctccaggttctagcccttctgcatctaccggtaccggtccaggtagctctactccttctggtgctactggctctcca

SEQ ID NO: 533 - DNA, 108 bp, Artificial Sequence
  Description of Artificial Sequence: Synthetic polynucleotide
ggtgcttccccgggcactagctctaccggttctccaggttctagcccttctgcatctactggtactggcccaggtactccgggcagcggtactgcttcttcctctcca

SEQ ID NO: 534 - DNA, 108 bp, Artificial Sequence
  Description of Artificial Sequence: Synthetic polynucleotide
ggtagctctactccgtctggtgctaccggctctccaggtagctctaccccttctggtgcaaccggctccccaggtgcttctccgggtaccagctctactggttctcca

SEQ ID NO: 535 - DNA, 108 bp, Artificial Sequence
  Description of Artificial Sequence: Synthetic polynucleotide
ggtacccctggcagcggtaccgcttcttcctctccaggtagctctaccccgtctggtgctactggctctccaggttctagcccgtctgcatctaccggtaccggccca

SEQ ID NO: 536 - DNA, 108 bp, Artificial Sequence
  Description of Artificial Sequence: Synthetic polynucleotide
ggtagctctactccttctggtgcaaccggctccccaggtaccccgggcagcggtaccgcatcttcctctccaggtactccgggtagcggtactgcttcttcttctcca

SEQ ID NO: 537 - DNA, 108 bp, Artificial Sequence
  Description of Artificial Sequence: Synthetic polynucleotide
ggtaccccgggtagcggtactgcttcttcctctccaggtagctctaccccttctggtgcaaccggctctccaggtgcttctccgggcaccagctctaccggttctcca

SEQ ID NO: 538 - DNA, 108 bp, Artificial Sequence
  Description of Artificial Sequence: Synthetic polynucleotide
ggtagctctaccccgtctggtgctaccggctctccaggtagctctaccccgtctggtgcaaccggctccccaggtgcatccccgggtactagctctaccggttctcca

SEQ ID NO: 539 - DNA, 108 bp, Artificial Sequence
  Description of Artificial Sequence: Synthetic polynucleotide
ggtgcttctccgggcaccagctctactggttctccaggtaccccgggcagcggtaccgcatcttcttctccaggtagctctactccttctggtgcaactggttctcca

SEQ ID NO: 540 - DNA, 108 bp, Artificial Sequence
  Description of Artificial Sequence: Synthetic polynucleotide
ggttctagcccgtctgcttccaccggtactggcccaggtagctctaccccgtctggtgcaactggttccccaggtacccctggtagcggtaccgcttcttcttctcca

SEQ ID NO: 541 - DNA, 108 bp, Artificial Sequence
  Description of Artificial Sequence: Synthetic polynucleotide
ggtgcttctccgggcaccagctctactggttctccaggttctagcccttctgcatccaccggtaccggtccaggtagctctaccccttctggtgcaaccggctctcca

SEQ ID NO: 542 - DNA, 108 bp, Artificial Sequence
  Description of Artificial Sequence: Synthetic polynucleotide
ggtgcatccccgggcaccagctctaccggttctccaggtagctctaccccgtctggtgctaccggctctccaggtagctctaccccgtctggtgctactggctctcca

SEQ ID NO: 543 - DNA, 108 bp, Artificial Sequence
  Description of Artificial Sequence: Synthetic polynucleotide
ggtacccctggtagcggtactgcttcttcctctccaggtagctctactccgtctggtgctaccggttctccaggtaccccgggtagcggtaccgcatcttcttctcca

SEQ ID NO: 544 - DNA, 108 bp, Artificial Sequence
  Description of Artificial Sequence: Synthetic polynucleotide
ggttctagcccttctgcttccaccggtactggcccaggtagctctaccccttctggtgctaccggctccccaggtagctctactccttctggtgcaactggctctcca

SEQ ID NO: 545 - DNA, 108 bp, Artificial Sequence
  Description of Artificial Sequence: Synthetic polynucleotide
ggtgcttctcctggcaccagctctactggttctccaggttctagcccttctgcttctaccggtactggtccaggttctagcccttctgcatccactggtactggtcca

SEQ ID NO: 546 - DNA, 108 bp, Artificial Sequence
  Description of Artificial Sequence: Synthetic polynucleotide
ggtactcctggcagcggtaccgcttcttcttctccaggtgcttctcctggtactagctctactggttctccaggtgcttctccgggcactagctctactggttctcca

SEQ ID NO: 547 - DNA, 108 bp, Artificial Sequence
  Description of Artificial Sequence: Synthetic polynucleotide
ggtagctctaccccgtctggtgctaccggttccccaggtgcttctcctggtactagctctaccggttctccaggtagctctaccccgtctggtgctactggctctcca

SEQ ID NO: 548 - DNA, 108 bp, Artificial Sequence
  Description of Artificial Sequence: Synthetic polynucleotide
ggtagctctaccccgtctggtgctactggttctccaggtactccgggcagcggtactgcttcttcctctccaggtagctctaccccttctggtgctactggctctcca

SEQ ID NO: 549 - DNA, 108 bp, Artificial Sequence
  Description of Artificial Sequence: Synthetic polynucleotide
ggtgcatctcctggtaccagctctactggttctccaggttctagcccttctgcttctaccggtaccggtccaggtagctctactccttctggtgctaccggttctcca

SEQ ID NO: 550 - DNA, 108 bp, Artificial Sequence
  Description of Artificial Sequence: Synthetic polynucleotide
ggtagctctaccccgtctggtgctactggctctccaggtagctctactccttctggtgctactggttccccaggtagctctaccccgtctggtgcaactggctctcca

SEQ ID NO: 551 - DNA, 108 bp, Artificial Sequence
  Description of Artificial Sequence: Synthetic polynucleotide
ggtgcatccccgggtaccagctctaccggttctccaggtactcctggcagcggtactgcatcttcctctccaggtgcttctccgggcaccagctctactggttctcca

SEQ ID NO: 552 - DNA, 108 bp, Artificial Sequence
  Description of Artificial Sequence: Synthetic polynucleotide
ggtagctctactccttctggtgcaactggttctccaggttctagcccgtctgcatccactggtaccggtccaggtgcttcccctggcaccagctctaccggttctcca

SEQ ID NO: 553 - DNA, 108 bp, Artificial Sequence
  Description of Artificial Sequence: Synthetic polynucleotide
ggtgcatctcctggtactagctctactggttctccaggtagctctactccgtctggtgcaaccggctctccaggttctagcccttctgcatctaccggtactggtcca

SEQ ID NO: 554 - DNA, 108 bp, Artificial Sequence
  Description of Artificial Sequence: Synthetic polynucleotide
ggtactcctggcagcggtaccgcatcttcctctccaggtagctctactccgtctggtgcaactggttccccaggtgcttctccgggtaccagctctaccggttctcca

SEQ ID NO: 555 - DNA, 108 bp, Artificial Sequence
  Description of Artificial Sequence: Synthetic polynucleotide
ggtagctctaccccgtctggtgcaaccggctccccaggtactcctggtagcggtaccgcttcttcttctccaggtagctctactccgtctggtgctaccggctcccca

SEQ ID NO: 556 - DNA, 108 bp, Artificial Sequence
  Description of Artificial Sequence: Synthetic polynucleotide
ggttctagcccttctgcatccaccggtaccggcccaggttctagcccgtctgcttctaccggtactggtccaggtgcttctccgggtactagctctactggttctcca

SEQ ID NO: 557 - DNA, 108 bp, Artificial Sequence
  Description of Artificial Sequence: Synthetic polynucleotide
ggtaccccgggtagcggtaccgcttcttcttctccaggtagctctactccgtctggtgctaccggctctccaggttctaacccttctgcatccaccggtaccggccca

SEQ ID NO: 558 - DNA, 108 bp, Artificial Sequence
  Description of Artificial Sequence: Synthetic polynucleotide
ggttctagcccttctgcatctactggtactggcccaggtagctctactccttctggtgctaccggctctccaggtgcttctccgggtactagctctaccggttctcca

SEQ ID NO: 559 - DNA, 108 bp, Artificial Sequence
  Description of Artificial Sequence: Synthetic polynucleotide
ggtagctctaccccttctggtgcaaccggctctccaggtgcatccccgggtaccagctctaccggttctccaggtactccgggtagcggtaccgcttcttcctctcca

SEQ ID NO: 560 - DNA, 108 bp, Artificial Sequence
  Description of Artificial Sequence: Synthetic polynucleotide
ggtagctctactccgtctggtgcaaccggttccccaggtagctctaccccttctggtgcaaccggctccccaggtagctctaccccttctggtgcaactggctctcca

SEQ ID NO: 561 - DNA, 108 bp, Artificial Sequence
  Description of Artificial Sequence: Synthetic polynucleotide
ggtgcttctcctggcactagctctaccggttctccaggtacccctggtagcggtaccgcatcttcctctccaggtagctctactccttctggtgctactggttcccca

SEQ ID NO: 562 - DNA, 108 bp, Artificial Sequence
  Description of Artificial Sequence: Synthetic polynucleotide
ggtagctctaccccgtctggtgctactggctccccaggttctagcccttctgcatccaccggtaccggtccaggttctagcccgtctgcatctactggtactggtcca

SEQ ID NO: 563 - DNA, 108 bp, Artificial Sequence
  Description of Artificial Sequence: Synthetic polynucleotide
ggtgcttccccgggcaccagctctactggttctccaggttctagcccgtctgcttctactggtactggtccaggttctagcccttctgcttccactggtactggtcca

SEQ ID NO: 564 - DNA, 108 bp, Artificial Sequence
  Description of Artificial Sequence: Synthetic polynucleotide
ggtgcttccccgggtaccagctctaccggttctccaggttctagcccttctgcttctaccggtaccggtccaggtacccctggcagcggtaccgcatcttcctctcca

SEQ ID NO: 565 - DNA, 432 bp, Artificial Sequence
  Description of Artificial Sequence: Synthetic polynucleotide
ggtaccccgggcagcggtaccgcatcttcctctccaggtagctctaccccgtctggtgctaccggttccccaggtagctctaccccgtctggtgcaaccggctccccaggtagcccggctggctctcctacctctactgaggaaggtacttctgaaagcgctactcctgagtctggtccaggtacctctactgaaccgtccgaaggtagcgctccaggttctagcccttctgcatccaccggtaccggcccaggttctagcccgtctgcttctaccggtactggtccaggtgcttctccgggtactagctctactggttctccaggtacctctaccgaaccgtccgagggtagcgcaccaggtacctctactgaaccgtctgagggtagcgctccaggtagcgaaccggcaacctccggttctgaaactcca

SEQ ID NO: 566 - DNA, 432 bp, Artificial Sequence
  Description of Artificial Sequence: Synthetic polynucleotide
ggttctaccagcgaatccccttctggcactgcaccaggttctactagcgaatccccttctggtaccgcaccaggtacttctccgagcggcgaatcttctactgctccaggtacctctactgaaccttccgaaggcagcgctccaggtacctctaccgaaccgtccgagggcagcgcaccaggtacttctgaaagcgcaacccctgaatccggtccaggtgcatctcctggtaccagctctaccggttctccaggtagctctactccttctggtgctactggctctccaggtgcttccccgggtaccagctctaccggttctccaggttctactagcgaatctccttctggcactgcaccaggttctaccagcgaatctccgtctggcactgcaccaggtacctctacccctgaaagcggttccgcttctcca

SEQ ID NO: 567 - DNA, 432 bp, Artificial Sequence
  Description of Artificial Sequence: Synthetic polynucleotide
ggtacttctaccgaaccttccgagggcagcgcaccaggtacttctgaaagcgctacccctgagtccggcccaggtacttctgaaagcgctactcctgaatccggtccaggtacctctactgaaccttctgagggcagcgctccaggtacttctgaaagcgctaccccggagtccggtccaggtacttctactgaaccgtccgaaggtagcgcaccaggtacttctactgaaccttccgaaggtagcgctccaggtagcgaacctgctacttctggttctgaaaccccaggtagcccggctggctctccgacctccaccgaggaaggtgcttctcctggcaccagctctactggttctccaggttctagcccttctgcttctaccggtactggtccaggttctagcccttctgcatccactggtactggtcca

SEQ ID NO: 568 - DNA, 432 bp, Artificial Sequence
  Description of Artificial Sequence: Synthetic polynucleotide
ggtagcgaaccggcaacctctggctctgaaaccccaggtacctctgaaagcgctactccggaatctggtccaggtacttctgaaagcgctactccggaatccggtccaggttctaccagcgaatctccttctggcaccgctccaggttctactagcgaatccccgtctggtaccgcaccaggtacttctcctagcggcgaatcttctaccgcaccaggtgcatctccgggtactagctctaccggttctccaggttctagcccttctgcttccactggtaccggcccaggtagctctaccccgtctggtgctactggttccccaggtagctctactccgtctggtgcaaccggttccccaggtagctctactccttctggtgctactggctccccaggtgcatcccctggcaccagctctaccggttctcca

SEQ ID NO: 569 - DNA, 432 bp, Artificial Sequence
  Description of Artificial Sequence: Synthetic polynucleotide
ggtgcttctccgggcaccagctctactggttctccaggttctagcccttctgcatccaccggtaccggtccaggtagctctaccccttctggtgcaaccggctctccaggtacttctgaaagcgctaccccggaatctggcccaggtagcgaaccggctacttctggttctgaaaccccaggtagcgaaccggctacctccggttctgaaactccaggtacttctgaaagcgctactccggagtccggtccaggtacctctaccgaaccgtccgaaggcagcgctccaggtacttctactgaaccttctgagggtagcgctccaggtacctctaccgaaccgtccgagggtagcgcaccaggtacctctactgaaccgtctgagggtagcgctccaggtagcgaaccggcaacctccggttctgaaactcca

SEQ ID NO: 570 - DNA, 432 bp, Artificial Sequence
  Description of Artificial Sequence: Synthetic polynucleotide
ggtacctctaccgaaccttccgaaggtagcgctccaggtagcccggcaggttctcctacttccactgaggaaggtacttctaccgaaccttctgagggtagcgcaccaggtacctctgaaagcgcaactcctgagtctggcccaggtagcgaacctgctacctccggctctgagactccaggtacctctgaaagcgcaaccccggaatctggtccaggtagcccggctggctctcctacctctactgaggaaggtacttctgaaagcgctactcctgagtctggtccaggtacctctactgaaccgtccgaaggtagcgctccaggtagcgaacctgctacttctggttctgaaactccaggtacttctaccgaaccgtccgagggtagcgctccaggtagcgaacctgctacttctggttctgaaactcca

SEQ ID NO: 571 - DNA, 432 bp, Artificial Sequence
  Description of Artificial Sequence: Synthetic polynucleotide
ggtacttctaccgaaccgtccgaaggcagcgctccaggtacctctactgaaccttccgagggcagcgctccaggtacctctaccgaaccttctgaaggtagcgcaccaggtacttctaccgaaccgtccgaaggcagcgctccaggtacctctactgaaccttccgagggcagcgctccaggtacctctaccgaaccttctgaaggtagcgcaccaggtacttctaccgaaccttccgagggcagcgcaccaggtacttctgaaagcgctacccctgagtccggcccaggtacttctgaaagcgctactcctgaatccggtccaggtacttctactgaaccttccgaaggtagcgctccaggtagcgaacctgctacttctggttctgaaaccccaggtagcccggctggctctccgacctccaccgaggaa

SEQ ID NO: 572 - DNA, 432 bp, Artificial Sequence
  Description of Artificial Sequence: Synthetic polynucleotide
ggtacttctaccgaaccgtccgagggcagcgctccaggtacttctactgaaccttctgaaggcagcgctccaggtacttctactgaaccttccgaaggtagcgcaccaggttctaccagcgaatccccttctggtactgctccaggttctaccagcgaatccccttctggcaccgcaccaggtacttctacccctgaaagcggctccgcttctccaggtagcgaacctgcaacctctggctctgaaaccccaggtacctctgaaagcgctactcctgaatctggcccaggtacttctactgaaccgtccgagggcagcgcaccaggtacttctactgaaccgtctgaaggtagcgcaccaggtacttctgaaagcgcaaccccggaatccggcccaggtacctctgaaagcgcaaccccggagtccggccca

SEQ ID NO: 573 - DNA, 432 bp, Artificial Sequence
  Description of Artificial Sequence: Synthetic polynucleotide
ggtagctctaccccttctggtgctaccggctctccaggttctagcccgtctgcttctaccggtaccggtccaggtagctctaccccttctggtgctactggttctccaggtagccctgctggctctccgacttctactgaggaaggtagcccggctggttctccgacttctactgaggaaggtacttctaccgaaccttccgaaggtagcgctccaggtgcttccccgggcactagctctaccggttctccaggttctagcccttctgcatctactggtactggcccaggtactccgggcagcggtactgcttcttcctctccaggttctactagctctactgctgaatctcctggcccaggtacttctcctagcggtgaatcttctaccgctccaggtacctctactccggaaagcggttctgcatctcca

SEQ ID NO: 574 - DNA, 432 bp, Artificial Sequence
  Description of Artificial Sequence: Synthetic polynucleotide
ggtacctctactgaaccttctgagggcagcgctccaggtacttctgaaagcgctaccccggagtccggtccaggtacttctactgaaccgtccgaaggtagcgcaccaggtacttctactgaaccgtctgaaggtagcgcaccaggtacttctgaaagcgcaaccccggaatccggcccaggtacctctgaaagcgcaaccccggagtccggcccaggtactcctggcagcggtaccgcttcttcttctccaggtgcttctcctggtactagctctactggttctccaggtgcttctccgggcactagctctactggttctccaggtagccctgctggctctccgacttctactgaggaaggtagcccggctggttctccgacttctactgaggaaggtacttctaccgaaccttccgaaggtagcgctcca

SEQ ID NO: 575 - DNA, 432 bp, Artificial Sequence
  Description of Artificial Sequence: Synthetic polynucleotide
ggtagcccagcaggctctccgacttccactgaggaaggtacttctactgaaccttccgaaggcagcgcaccaggtacctctactgaaccttctgagggcagcgctccaggtacctctaccgaaccgtctgaaggtagcgcaccaggtacctctgaaagcgcaactcctgagtccggtccaggtacttctgaaagcgcaaccccggagtctggcccaggtaccccgggtagcggtactgcttcttcctctccaggtagctctaccccttctggtgcaaccggctctccaggtgcttctccgggcaccagctctaccggttctccaggtacctctactgaaccttctgagggcagcgctccaggtacttctgaaagcgctaccccggagtccggtccaggtacttctactgaaccgtccgaaggtagcgcacca

SEQ ID NO: 576 - DNA, 432 bp, Artificial Sequence
  Description of Artificial Sequence: Synthetic polynucleotide
ggtagcgaaccggcaacctccggctctgaaactccaggtacttctgaaagcgctactccggaatccggcccaggtagcgaaccggctacttccggctctgaaaccccaggtagctctaccccgtctggtgcaaccggctccccaggtactcctggtagcggtaccgcttcttcttctccaggtagctctactccgtctggtgctaccggctccccaggtgcatctcctggtaccagctctaccggttctccaggtagctctactccttctggtgctactggctctccaggtgcttccccgggtaccagctctaccggttctccaggtagcgaacctgctacttctggttctgaaactccaggtacttctaccgaaccgtccgagggtagcgctccaggtagcgaacctgctacttctggttctgaaactcca

SEQ ID NO: 577 - DNA, 432 bp, Artificial Sequence
  Description of Artificial Sequence: Synthetic polynucleotide
ggtacctctactgaaccttccgaaggcagcgctccaggtacctctaccgaaccgtccgagggcagcgcaccaggtacttctgaaagcgcaacccctgaatccggtccaggtagccctgctggctctccgacttctactgaggaaggtagcccggctggttctccgacttctactgaggaaggtacttctaccgaaccttccgaaggtagcgctccaggtagcccggctggttctccgacttccaccgaggaaggtacctctactgaaccttctgagggtagcgctccaggtacctctactgaaccttccgaaggcagcgctccaggtgcttccccgggcaccagctctactggttctccaggttctagcccgtctgcttctactggtactggtccaggttctagcccttctgcttccactggtactggtcca

SEQ ID NO: 578 - DNA, 432 bp, Artificial Sequence
  Description of Artificial Sequence: Synthetic polynucleotide
ggtagctctaccccgtctggtgctaccggttccccaggtgcttctcctggtactagctctaccggttctccaggtagctctaccccgtctggtgctactggctctccaggtagccctgctggctctccaacctccaccgaagaaggtacctctgaaagcgcaacccctgaatccggcccaggtagcgaaccggcaacctccggttctgaaaccccaggtgcatctcctggtactagctctactggttctccaggtagctctactccgtctggtgcaaccggctctccaggttctagcccttctgcatctaccggtactggtccaggttctaccagcgaatccccttctggtactgctccaggttctaccagcgaatccccttctggcaccgcaccaggtacttctacccctgaaagcggctccgcttctcca

SEQ ID NO: 579 - DNA, 432 bp, Artificial Sequence
  Description of Artificial Sequence: Synthetic polynucleotide
ggttctaccagcgaatctccttctggcaccgctccaggttctactagcgaatccccgtctggtaccgcaccaggtacttctcctagcggcgaatcttctaccgcaccaggtacctctgaaagcgctactccggagtctggcccaggtacctctactgaaccgtctgagggtagcgctccaggtacttctactgaaccgtccgaaggtagcgcaccaggtacctctactgaaccttctgagggcagcgctccaggtacttctgaaagcgctaccccggagtccggtccaggtacttctactgaaccgtccgaaggtagcgcaccaggtagctctaccccgtctggtgctaccggttccccaggtgcttctcctggtactagctctaccggttctccaggtagctctaccccgtctggtgctactggctctcca

SEQ ID NO: 580 - DNA, 432 bp, Artificial Sequence
  Description of Artificial Sequence: Synthetic polynucleotide
ggttctactagctctactgcagaatctccgggcccaggtacctctcctagcggtgaatcttctaccgctccaggtacttctccgagcggtgaatcttctaccgctccaggttctactagctctaccgctgaatctccgggtccaggttctaccagctctactgcagaatctcctggcccaggtacttctactccggaaagcggttccgcttctccaggtacttctcctagcggtgaatcttctaccgctccaggttctaccagctctactgctgaatctcctggcccaggtacttctaccccggaaagcggctccgcttctccaggttctaccagctctaccgctgaatctcctggcccaggttctactagcgaatctccgtctggcaccgcaccaggtacttcccctagcggtgaatcttctactgcacca

SEQ ID NO: 581 - DNA, 432 bp, Artificial Sequence
  Description of Artificial Sequence: Synthetic polynucleotide
ggtacctctactccggaaagcggttccgcatctccaggttctaccagcgaatccccgtctggcaccgcaccaggttctactagctctactgctgaatctccgggcccaggtacctctactgaaccttccgaaggcagcgctccaggtacctctaccgaaccgtccgagggcagcgcaccaggtacttctgaaagcgcaacccctgaatccggtccaggtacctctgaaagcgctactccggagtctggcccaggtacctctactgaaccgtctgagggtagcgctccaggtacttctactgaaccgtccgaaggtagcgcaccaggtacttctgaaagcgctactccggagtccggtccaggtacctctaccgaaccgtccgaaggcagcgctccaggtacttctactgaaccttctgagggtagcgctccc

SEQ ID NO: 582 - DNA, 432 bp, Artificial Sequence
  Description of Artificial Sequence: Synthetic polynucleotide
ggtacctctaccgaaccgtccgagggtagcgcaccaggtacctctactgaaccgtctgagggtagcgctccaggtagcgaaccggcaacctccggttctgaaactccaggtacttctactgaaccgtctgaaggtagcgcaccaggtacttctgaaagcgcaaccccggaatccggcccaggtacctctgaaagcgcaaccccggagtccggcccaggtgcatctccgggtactagctctaccggttctccaggttctagcccttctgcttccactggtaccggcccaggtagctctaccccgtctggtgctactggttccccaggtagctctactccgtctggtgcaaccggttccccaggtagctctactccttctggtgctactggctccccaggtgcatcccctggcaccagctctaccggttctcca

SEQ ID NO: 583 - DNA, 432 bp, Artificial Sequence
  Description of Artificial Sequence: Synthetic polynucleotide
ggtagcgaaccggcaacctctggctctgaaactccaggtagcgaacctgcaacctccggctctgaaaccccaggtacttctactgaaccttctgagggcagcgcaccaggtagcgaacctgcaacctctggctctgaaaccccaggtacctctgaaagcgctactcctgaatctggcccaggtacttctactgaaccgtccgagggcagcgcaccaggtagctctactccgtctggtgctaccggctctccaggtagctctaccccttctggtgcaaccggctccccaggtgcttctccgggtaccagctctactggttctccaggtagctctaccccgtctggtgctaccggttccccaggtgcttctcctggtactagctctaccggttctccaggtagctctaccccgtctggtgctactggctctcca

SEQ ID NO: 584 - DNA, 432 bp, Artificial Sequence
  Description of Artificial Sequence: Synthetic polynucleotide
ggtacttctaccgaaccgtccgagggcagcgctccaggtacttctactgaaccttctgaaggcagcgctccaggtacttctactgaaccttccgaaggtagcgcaccaggtacttctgaaagcgctactccggagtccggtccaggtacctctaccgaaccgtccgaaggcagcgctccaggtacttctactgaaccttctgagggtagcgctccaggttctactagcgaatctccgtctggcactgctccaggtacttctcctagcggtgaatcttctaccgctccaggtacttcccctagcggcgaatcttctaccgctccaggtagcccggctggctctcctacctctactgaggaaggtacttctgaaagcgctactcctgagtctggtccaggtacctctactgaaccgtccgaaggtagcgctcca

SEQ ID NO: 585 - DNA, 432 bp, Artificial Sequence
  Description of Artificial Sequence: Synthetic polynucleotide
ggtacttctactgaaccttccgaaggtagcgctccaggtagcgaacctgctacttctggttctgaaaccccaggtagcccggctggctctccgacctccaccgaggaaggtagcccggcaggctctccgacctctactgaggaaggtacttctgaaagcgcaaccccggagtccggcccaggtacctctaccgaaccgtctgagggcagcgcaccaggtacctctactgaaccttccgaaggcagcgctccaggtacctctaccgaaccgtccgagggcagcgcaccaggtacttctgaaagcgcaacccctgaatccggtccaggtagctctactccgtctggtgcaaccggctccccaggttctagcccgtctgcttccactggtactggcccaggtgcttccccgggcaccagctctactggttctcca

SEQ ID NO: 586 - DNA, 432 bp, Artificial Sequence
  Description of Artificial Sequence: Synthetic polynucleotide
ggtagcgaaccggctacttccggctctgagactccaggtagccctgctggctctccgacctctaccgaagaaggtacctctgaaagcgctacccctgagtctggcccaggtacctctactgaaccttccgaaggcagcgctccaggtacctctaccgaaccgtccgagggcagcgcaccaggtacttctgaaagcgcaacccctgaatccggtccaggtacctctactccggaaagcggttccgcatctccaggttctaccagcgaatccccgtctggcaccgcaccaggttctactagctctactgctgaatctccgggcccaggtacttctgaaagcgctactccggagtccggtccaggtacctctaccgaaccgtccgaaggcagcgctccaggtacttctactgaaccttctgagggtagcgctcca

SEQ ID NO: 587 - DNA, 432 bp, Artificial Sequence
  Description of Artificial Sequence: Synthetic polynucleotide
ggtacttctaccgaaccgtccgagggcagcgctccaggtacttctactgaaccttctgaaggcagcgctccaggtacttctactgaaccttccgaaggtagcgcaccaggtacctctaccgaaccgtctgaaggtagcgcaccaggtacctctgaaagcgcaactcctgagtccggtccaggtacttctgaaagcgcaaccccggagtctggcccaggtactcctggcagcggtaccgcatcttcctctccaggtagctctactccgtctggtgcaactggttccccaggtgcttctccgggtaccagctctaccggttctccaggttccaccagctctactgctgaatctcctggtccaggtacctctcctagcggtgaatcttctactgctccaggtacttctactcctgaaagcggctctgcttctcca

SEQ ID NO: 588 - DNA, 432 bp, Artificial Sequence
  Description of Artificial Sequence: Synthetic polynucleotide
ggtagcccggcaggctctccgacctctactgaggaaggtacttctgaaagcgcaaccccggagtccggcccaggtacctctaccgaaccgtctgagggcagcgcaccaggtacttctgaaagcgcaacccctgaatccggtccaggtagcgaaccggctacttctggctctgagactccaggtacttctaccgaaccgtccgaaggtagcgcaccaggtagcccggctggttctccgacttccaccgaggaaggtacctctactgaaccttctgagggtagcgctccaggtacctctactgaaccttccgaaggcagcgctccaggtacttctaccgaaccgtccgagggcagcgctccaggtacttctactgaaccttctgaaggcagcgctccaggtacttctactgaaccttccgaaggtagcgcacca

SEQ ID NO: 589 - DNA, 432 bp, Artificial Sequence
  Description of Artificial Sequence: Synthetic polynucleotide
ggtacttctccgagcggtgaatcttctaccgcaccaggttctactagctctaccgctgaatctccgggcccaggtacttctccgagcggtgaatcttctactgctccaggtacctctgaaagcgctactccggagtctggcccaggtacctctactgaaccgtctgagggtagcgctccaggtacttctactgaaccgtccgaaggtagcgcaccaggttctagcccttctgcatctactggtactggcccaggtagctctactccttctggtgctaccggctctccaggtgcttctccgggtactagctctaccggttctccaggtacttctactccggaaagcggttccgcatctccaggtacttctcctagcggtgaatcttctactgctccaggtacctctcctagcggcgaatcttctactgctcca

SEQ ID NO: 590 - DNA, 432 bp, Artificial Sequence
  Description of Artificial Sequence: Synthetic polynucleotide
ggtacctctgaaagcgctactccggagtctggcccaggtacctctactgaaccgtctgagggtagcgctccaggtacttctactgaaccgtccgaaggtagcgcaccaggtagccctgctggctctccgacttctactgaggaaggtagcccggctggttctccgacttctactgaggaaggtacttctaccgaaccttccgaaggtagcgctccaggttctagcccttctgcttccaccggtactggcccaggtagctctaccccttctggtgctaccggctccccaggtagctctactccttctggtgcaactggctctccaggtagcgaaccggcaacttccggctctgaaaccccaggtacttctgaaagcgctactcctgagtctggcccaggtagcgaacctgctacctctggctctgaaacccca

SEQ ID NO: 591 - DNA, 432 bp, Artificial Sequence
  Description of Artificial Sequence: Synthetic polynucleotide
ggtacttctaccgaaccgtccgaaggcagcgctccaggtacctctactgaaccttccgagggcagcgctccaggtacctctaccgaaccttctgaaggtagcgcaccaggtagctctaccccgtctggtgctaccggttccccaggtgcttctcctggtactagctctaccggttctccaggtagctctaccccgtctggtgctactggctctccaggtacttctgaaagcgcaacccctgaatccggtccaggtagcgaaccggctacttctggctctgagactccaggtacttctaccgaaccgtccgaaggtagcgcaccaggttctactagcgaatctccttctggcactgcaccaggttctaccagcgaatctccgtctggcactgcaccaggtacctctacccctgaaagcggttccgcttctcca

SEQ ID NO: 592 - DNA, 432 bp, Artificial Sequence
  Description of Artificial Sequence: Synthetic polynucleotide
ggtacctctactcctgaaagcggttctgcatctccaggttccactagctctaccgcagaatctccgggcccaggttctactagctctactgctgaatctcctggcccaggttctagcccttctgcatctactggtactggcccaggtagctctactccttctggtgctaccggctctccaggtgcttctccgggtactagctctaccggttctccaggtagcgaaccggcaacctccggctctgaaaccccaggtacctctgaaagcgctactcctgaatccggcccaggtagcccggcaggttctccgacttccactgaggaaggttctactagcgaatctccttctggcactgcaccaggttctaccagcgaatctccgtctggcactgcaccaggtacctctacccctgaaagcggttccgcttctccc

SEQ ID NO: 593 - DNA, 432 bp, Artificial Sequence
  Description of Artificial Sequence: Synthetic polynucleotide
ggtagcccggctggctctcctacctctactgaggaaggtacttctgaaagcgctactcctgagtctggtccaggtacctctactgaaccgtccgaaggtagcgctccaggttctaccagcgaatctccttctggcaccgctccaggttctactagcgaatccccgtctggtaccgcaccaggtacttctcctagcggcgaatcttctaccgcaccaggtacctctaccgaaccttccgaaggtagcgctccaggtagcccggcaggttctcctacttccactgaggaaggtacttctaccgaaccttctgagggtagcgcaccaggtagcgaacctgcaacctctggctctgaaaccccaggtacctctgaaagcgctactcctgaatctggcccaggtacttctactgaaccgtccgagggcagcgcacca

SEQ ID NO: 594 - DNA, 432 bp, Artificial Sequence
  Description of Artificial Sequence: Synthetic polynucleotide
ggtacctctaccgaaccttccgaaggtagcgctccaggtagcccggcaggttctcctacttccactgaggaaggtacttctaccgaaccttctgagggtagcgcaccaggtacctcccctagcggcgaatcttctactgctccaggtacctctcctagcggcgaatcttctaccgctccaggtacctcccctagcggtgaatcttctaccgcaccaggttctaccagcgaatccccttctggtactgctccaggttctaccagcgaatccccttctggcaccgcaccaggtacttctacccctgaaagcggctccgcttctccaggtagcgaacctgcaacctctggctctgaaaccccaggtacctctgaaagcgctactcctgaatctggcccaggtacttctactgaaccgtccgagggcagcgcacca

SEQ ID NO: 595 - DNA, 432 bp, Artificial Sequence
  Description of Artificial Sequence: Synthetic polynucleotide
ggtagcgaaccggcaacctctggctctgaaaccccaggtacctctgaaagcgctactccggaatctggtccaggtacttctgaaagcgctactccggaatccggtccaggtacttctccgagcggtgaatcttctaccgcaccaggttctactagctctaccgctgaatctccgggcccaggtacttctccgagcggtgaatcttctactgctccaggttctactagcgaatccccgtctggtactgctccaggtacttcccctagcggtgaatcttctactgctccaggttctaccagctctaccgcagaatctccgggtccaggtagctctactccgtctggtgcaaccggttccccaggtagctctaccccttctggtgcaaccggctccccaggtagctctaccccttctggtgcaaactggctctcc

SEQ ID NO: 596 - DNA, 432 bp, Artificial Sequence
  Description of Artificial Sequence: Synthetic polynucleotide
ggtagccctgctggctctccgacttctactgaggaaggtagcccggctggttctccgacttctactgaggaaggtacttctaccgaaccttccgaaggtagcgctccaggtacctctactgaaccttccgaaggcagcgctccaggtacctctaccgaaccgtccgagggcagcgcaccaggtacttctgaaagcgcaacccctgaatccggtccaggtgcatctcctggtaccagctctaccggttctccaggtagctctactccttctggtgctactggctctccaggtgcttccccgggtaccagctctaccggttctccaggtagctctaccccgtctggtgctactggttctccaggtactccgggcagcggtactgcttcttcctctccaggtagctctaccccttctggtgctactggctctcca

SEQ ID NO: 597 - DNA, 432 bp, Artificial Sequence
  Description of Artificial Sequence: Synthetic polynucleotide
ggtagctctaccccgtctggtgctactggttctccaggtactccgggcagcggtactgcttcttcctctccaggtagctctaccccttctggtgctactggctctccaggtagcccggctggctctcctacctctactgaggaaggtacttctgaaagcgctactcctgagtctggtccaggtacctctactgaaccgtccgaaggtagcgctccaggtacctctgaaagcgcaactcctgagtctggcccaggtagcgaacctgctacctccggctctgagactccaggtacctctgaaagcgcaaccccggaatctggtccaggtacttctactgaaccgtctgaaggtagcgcaccaggtacttctgaaagcgcaaccccggaatccggcccaggtacctctgaaagcgcaaccccggagtccggccca

SEQ ID NO: 598 - protein, 144 aa, Artificial Sequence
  Description of Artificial Sequence: Synthetic polypeptide
GTPGSGTASSSPGSSTPSGATGSPGSSTPSGATGSPGSPAGSPTSTEEGTSESATPESGPGTSTEPSEGSAPGSSPSASTGTGPGSSPSASTGTGPGASPGTSSTGSPGTSTEPSEGSAPGTSTEPSEGSAPGSEPATSGSETP

SEQ ID NO: 599 - protein, 144 aa, Artificial Sequence
  Description of Artificial Sequence: Synthetic polypeptide
GSTSESPSGTAPGSTSESPSGTAPGTSPSGESSTAPGTSTEPSEGSAPGTSTEPSEGSAPGTSESATPESGPGASPGTSSTGSPGSSTPSGATGSPGASPGTSSTGSPGSTSESPSGTAPGSTSESPSGTAPGTSTPESGSASP

SEQ ID NO: 600 - protein, 144 aa, Artificial Sequence
  Description of Artificial Sequence: Synthetic polypeptide
GTSTEPSEGSAPGTSESATPESGPGTSESATPESGPGTSTEPSEGSAPGTSESATPESGPGTSTEPSEGSAPGTSTEPSEGSAPGSEPATSGSETPGSPAGSPTSTEEGASPGTSSTGSPGSSPSASTGTGPGSSPSASTGTGP

SEQ ID NO: 601 - protein, 144 aa, Artificial Sequence
  Description of Artificial Sequence: Synthetic polypeptide
GSEPATSGSETPGTSESATPESGPGTSESATPESGPGSTSESPSGTAPGSTSESPSGTAPGTSPSGESSTAPGASPGTSSTGSPGSSPSASTGTGPGSSTPSGATGSPGSSTPSGATGSPGSSTPSGATGSPGASPGTSSTGSP

SEQ ID NO: 602 - protein, 144 aa, Artificial Sequence
  Description of Artificial Sequence: Synthetic polypeptide
GASPGTSSTGSPGSSPSASTGTGPGSSTPSGATGSPGTSESATPESGPGSEPATSGSETPGSEPATSGSETPGTSESATPESGPGTSTEPSEGSAPGTSTEPSEGSAPGTSTEPSEGSAPGTSTEPSEGSAPGSEPATSGSETP

SEQ ID NO: 603 - protein, 144 aa, Artificial Sequence
  Description of Artificial Sequence: Synthetic polypeptide
GTSTEPSEGSAPGSPAGSPTSTEEGTSTEPSEGSAPGTSESATPESGPGSEPATSGSETPGTSESATPESGPGSPAGSPTSTEEGTSESATPESGPGTSTEPSEGSAPGSEPATSGSETPGTSTEPSEGSAPGSEPATSGSETP

SEQ ID NO: 604 - protein, 144 aa, Artificial Sequence
  Description of Artificial Sequence: Synthetic polypeptide
GTSTEPSEGSAPGTSTEPSEGSAPGTSTEPSEGSAPGTSTEPSEGSAPGTSTEPSEGSAPGTSTEPSEGSAPGTSTEPSEGSAPGTSESATPESGPGTSESATPESGPGTSTEPSEGSAPGSEPATSGSETPGSPAGSPTSTEE

SEQ ID NO: 605 - protein, 144 aa, Artificial Sequence
  Description of Artificial Sequence: Synthetic polypeptide
GTSTEPSEGSAPGTSTEPSEGSAPGTSTEPSEGSAPGSTSESPSGTAPGSTSESPSGTAPGTSTPESGSASPGSEPATSGSETPGTSESATPESGPGTSTEPSEGSAPGTSTEPSEGSAPGTSESATPESGPGTSESATPESGP

SEQ ID NO: 606 - protein, 144 aa, Artificial Sequence
  Description of Artificial Sequence: Synthetic polypeptide
GSSTPSGATGSPGSSPSASTGTGPGSSTPSGATGSPGSPAGSPTSTEEGSPAGSPTSTEEGTSTEPSEGSAPGASPGTSSTGSPGSSPSASTGTGPGTPGSGTASSSPGSTSSTAESPGPGTSPSGESSTAPGTSTPESGSASP

SEQ ID NO: 607 - protein, 144 aa, Artificial Sequence
  Description of Artificial Sequence: Synthetic polypeptide
GTSTEPSEGSAPGTSESATPESGPGTSTEPSEGSAPGTSTEPSEGSAPGTSESATPESGPGTSESATPESGPGTPGSGTASSSPGASPGTSSTGSPGASPGTSSTGSPGSPAGSPTSTEEGSPAGSPTSTEEGTSTEPSEGSAP

SEQ ID NO: 608 - protein, 144 aa, Artificial Sequence
  Description of Artificial Sequence: Synthetic polypeptide
GSPAGSPTSTEEGTSTEPSEGSAPGTSTEPSEGSAPGTSTEPSEGSAPGTSESATPESGPGTSESATPESGPGTPGSGTASSSPGSSTPSGATGSPGASPGTSSTGSPGTSTEPSEGSAPGTSESATPESGPGTSTEPSEGSAP

SEQ ID NO: 609 - protein, 144 aa, Artificial Sequence
  Description of Artificial Sequence: Synthetic polypeptide
GSEPATSGSETPGTSESATPESGPGSEPATSGSETPGSSTPSGATGSPGTPGSGTASSSPGSSTPSGATGSPGASPGTSSTGSPGSSTPSGATGSPGASPGTSSTGSPGSEPATSGSETPGTSTEPSEGSAPGSEPATSGSETP

SEQ ID NO: 610 - protein, 144 aa, Artificial Sequence
  Description of Artificial Sequence: Synthetic polypeptide
GTSTEPSEGSAPGTSTEPSEGSAPGTSESATPESGPGSPAGSPTSTEEGSPAGSPTSTEEGTSTEPSEGSAPGSPAGSPTSTEEGTSTEPSEGSAPGTSTEPSEGSAPGASPGTSSTGSPGSSPSASTGTGPGSSPSASTGTGP

SEQ ID NO: 611 - protein, 144 aa, Artificial Sequence
  Description of Artificial Sequence: Synthetic polypeptide
GSSTPSGATGSPGASPGTSSTGSPGSSTPSGATGSPGSPAGSPTSTEEGTSESATPESGPGSEPATSGSETPGASPGTSSTGSPGSSTPSGATGSPGSSPSASTGTGPGSTSESPSGTAPGSTSESPSGTAPGTSTPESGSASP

SEQ ID NO: 612 - protein, 144 aa, Artificial Sequence
  Description of Artificial Sequence: Synthetic polypeptide
GSTSESPSGTAPGSTSESPSGTAPGTSPSGESSTAPGTSESATPESGPGTSTEPSEGSAPGTSTEPSEGSAPGTSTEPSEGSAPGTSESATPESGPGTSTEPSEGSAPGSSTPSGATGSPGASPGTSSTGSPGSSTPSGATGSP

SEQ ID NO: 613 - protein, 144 aa, Artificial Sequence
  Description of Artificial Sequence: Synthetic polypeptide
GSTSSTAESPGPGTSPSGESSTAPGTSPSGESSTAPGSTSSTAESPGPGSTSSTAESPGPGTSTPESGSASPGTSPSGESSTAPGSTSSTAESPGPGTSTPESGSASPGSTSSTAESPGPGSTSESPSGTAPGTSPSGESSTAP

SEQ ID NO: 614 - protein, 144 aa, Artificial Sequence
  Description of Artificial Sequence: Synthetic polypeptide
GTSTPESGSASPGSTSESPSGTAPGSTSSTAESPGPGTSTEPSEGSAPGTSTEPSEGSAPGTSESATPESGPGTSESATPESGPGTSTEPSEGSAPGTSTEPSEGSAPGTSESATPESGPGTSTEPSEGSAPGTSTEPSEGSAP

SEQ ID NO: 615 - protein, 144 aa, Artificial Sequence
  Description of Artificial Sequence: Synthetic polypeptide
GTSTEPSEGSAPGTSTEPSEGSAPGSEPATSGSETPGTSTEPSEGSAPGTSESATPESGPGTSESATPESGPGASPGTSSTGSPGSSPSASTGTGPGSSTPSGATGSPGSSTPSGATGSPGSSTPSGATGSPGASPGTSSTGSP

SEQ ID NO: 616 - protein, 144 aa, Artificial Sequence
  Description of Artificial Sequence: Synthetic polypeptide
GSEPATSGSETPGSEPATSGSETPGTSTEPSEGSAPGSEPATSGSETPGTSESATPESGPGTSTEPSEGSAPGSSTPSGATGSPGSSTPSGATGSPGASPGTSSTGSPGSSTPSGATGSPGASPGTSSTGSPGSSTPSGATGSP

SEQ ID NO: 617 - protein, 144 aa, Artificial Sequence
  Description of Artificial Sequence: Synthetic polypeptide
GTSTEPSEGSAPGTSTEPSEGSAPGTSTEPSEGSAPGTSESATPESGPGTSTEPSEGSAPGTSTEPSEGSAPGSTSESPSGTAPGTSPSGESSTAPGTSPSGESSTAPGSPAGSPTSTEEGTSESATPESGPGTSTEPSEGSAP

SEQ ID NO: 618 - protein, 144 aa, Artificial Sequence
  Description of Artificial Sequence: Synthetic polypeptide
GTSTEPSEGSAPGSEPATSGSETPGSPAGSPTSTEEGSPAGSPTSTEEGTSESATPESGPGTSTEPSEGSAPGTSTEPSEGSAPGTSTEPSEGSAPGTSESATPESGPGSSTPSGATGSPGSSPSASTGTGPGASPGTSSTGSP

SEQ ID NO: 619 - protein, 144 aa, Artificial Sequence
  Description of Artificial Sequence: Synthetic polypeptide
GSEPATSGSETPGSPAGSPTSTEEGTSESATPESGPGTSTEPSEGSAPGTSTEPSEGSAPGTSESATPESGPGTSTPESGSASPGSTSESPSGTAPGSTSSTAESPGPGTSESATPESGPGTSTEPSEGSAPGTSTEPSEGSAP

SEQ ID NO: 620 - protein, 144 aa, Artificial Sequence
  Description of Artificial Sequence: Synthetic polypeptide
GTSTEPSEGSAPGTSTEPSEGSAPGTSTEPSEGSAPGTSTEPSEGSAPGTSESATPESGPGTSESATPESGPGTPGSGTASSSPGSSTPSGATGSPGASPGTSSTGSPGSTSSTAESPGPGTSPSGESSTAPGTSTPESGSASP

SEQ ID NO: 621 - protein, 144 aa, Artificial Sequence
  Description of Artificial Sequence: Synthetic polypeptide
GSPAGSPTSTEEGTSESATPESGPGTSTEPSEGSAPGTSESATPESGPGSEPATSGSETPGTSTEPSEGSAPGSPAGSPTSTEEGTSTEPSEGSAPGTSTEPSEGSAPGTSTEPSEGSAPGTSTEPSEGSAPGTSTEPSEGSAP

SEQ ID NO: 622 - protein, 144 aa, Artificial Sequence
  Description of Artificial Sequence: Synthetic polypeptide
GTSPSGESSTAPGSTSSTAESPGPGTSPSGESSTAPGTSESATPESGPGTSTEPSEGSAPGTSTEPSEGSAPGSSPSASTGTGPGSSTPSGATGSPGASPGTSSTGSPGTSTPESGSASPGTSPSGESSTAPGTSPSGESSTAP

SEQ ID NO: 623 - protein, 144 aa, Artificial Sequence
  Description of Artificial Sequence: Synthetic polypeptide
GTSESATPESGPGTSTEPSEGSAPGTSTEPSEGSAPGSPAGSPTSTEEGSPAGSPTSTEEGTSTEPSEGSAPGSSPSASTGTGPGSSTPSGATGSPGSSTPSGATGSPGSEPATSGSETPGTSESATPESGPGSEPATSGSETP

SEQ ID NO: 624 - protein, 144 aa, Artificial Sequence
  Description of Artificial Sequence: Synthetic polypeptide
GTSTEPSEGSAPGTSTEPSEGSAPGTSTEPSEGSAPGSSTPSGATGSPGASPGTSSTGSPGSSTPSGATGSPGTSESATPESGPGSEPATSGSETPGTSTEPSEGSAPGSTSESPSGTAPGSTSESPSGTAPGTSTPESGSASP

SEQ ID NO: 625 - protein, 144 aa, Artificial Sequence
  Description of Artificial Sequence: Synthetic polypeptide
GTSTPESGSASPGSTSSTAESPGPGSTSSTAESPGPGSSPSASTGTGPGSSTPSGATGSPGASPGTSSTGSPGSEPATSGSETPGTSESATPESGPGSPAGSPTSTEEGSTSESPSGTAPGSTSESPSGTAPGTSTPESGSASP

SEQ ID NO: 626 - protein, 144 aa, Artificial Sequence
  Description of Artificial Sequence: Synthetic polypeptide
GSPAGSPTSTEEGTSESATPESGPGTSTEPSEGSAPGSTSESPSGTAPGSTSESPSGTAPGTSPSGESSTAPGTSTEPSEGSAPGSPAGSPTSTEEGTSTEPSEGSAPGSEPATSGSETPGTSESATPESGPGTSTEPSEGSAP

SEQ ID NO: 627 - protein, 144 aa, Artificial Sequence
  Description of Artificial Sequence: Synthetic polypeptide
GTSTEPSEGSAPGSPAGSPTSTEEGTSTEPSEGSAPGTSPSGESSTAPGTSPSGESSTAPGTSPSGESSTAPGSTSESPSGTAPGSTSESPSGTAPGTSTPESGSASPGSEPATSGSETPGTSESATPESGPGTSTEPSEGSAP

SEQ ID NO: 628 - protein, 144 aa, Artificial Sequence
  Description of Artificial Sequence: Synthetic polypeptide
GSEPATSGSETPGTSESATPESGPGTSESATPESGPGTSPSGESSTAPGSTSSTAESPGPGTSPSGESSTAPGSTSESPSGTAPGTSPSGESSTAPGSTSSTAESPGPGSSTPSGATGSPGSSTPSGATGSPGSSTPSGANWLS

SEQ ID NO: 629 - protein, 144 aa, Artificial Sequence
  Description of Artificial Sequence: Synthetic polypeptide
GSPAGSPTSTEEGSPAGSPTSTEEGTSTEPSEGSAPGTSTEPSEGSAPGTSTEPSEGSAPGTSESATPESGPGASPGTSSTGSPGSSTPSGATGSPGASPGTSSTGSPGSSTPSGATGSPGTPGSGTASSSPGSSTPSGATGSP

SEQ ID NO: 630 - protein, 144 aa, Artificial Sequence
  Description of Artificial Sequence: Synthetic polypeptide
GSSTPSGATGSPGTPGSGTASSSPGSSTPSGATGSPGSPAGSPTSTEEGTSESATPESGPGTSTEPSEGSAPGTSESATPESGPGSEPATSGSETPGTSESATPESGPGTSTEPSEGSAPGTSESATPESGPGTSESATPESGP

SEQ ID NO: 631 - DNA, 57 bp, Artificial Sequence
  Description of Artificial Sequence: Synthetic oligonucleotide
aggtgcaagcgcaagcggcgcgccaagcacgggaggttcgtcttcactcgagggtac

SEQ ID NO: 632 - DNA, 49 bp, Artificial Sequence
  Description of Artificial Sequence: Synthetic oligonucleotide
cctcgagtgaagacgaacctcccgtgcttggcgcgccgcttgcgcttgc

SEQ ID NO: 633 - protein, 11 aa, Artificial Sequence
  Description of Artificial Sequence: Synthetic peptide
GASASGAPSTG

SEQ ID NO: 634 - DNA, 57 bp, Artificial Sequence
  Description of Artificial Sequence: Synthetic oligonucleotide
aggtccagaaccaacggggccggccccaagcggaggttcgtcttcactcgagggtac

SEQ ID NO: 635 - DNA, 49 bp, Artificial Sequence
  Description of Artificial Sequence: Synthetic oligonucleotide
cctcgagtgaagacgaacctccgcttggggccggccccgttggttctgg

SEQ ID NO: 636 - protein, 11 aa, Artificial Sequence
  Description of Artificial Sequence: Synthetic peptide
GPEPTGPAPSG

SEQ ID NO: 637 - protein, 13 aa, Artificial Sequence
  Description of Artificial Sequence: Synthetic peptide
MASPAGSPTSTEE

SEQ ID NO: 638 - protein, 13 aa, Artificial Sequence
  Description of Artificial Sequence: Synthetic peptide
MATSESATPESGP

SEQ ID NO: 639 - protein, 13 aa, Artificial Sequence
  Description of Artificial Sequence: Synthetic peptide
MATSPSGESSTAP

SEQ ID NO: 640 - protein, 13 aa, Artificial Sequence
  Description of Artificial Sequence: Synthetic peptide
MESTSSTAESPGP

SEQ ID NO: 641 - protein, 13 aa, Artificial Sequence
  Description of Artificial Sequence: Synthetic peptide
MASSTPSGATGSP

SEQ ID NO: 642 - protein, 13 aa, Artificial Sequence
  Description of Artificial Sequence: Synthetic peptide
MEASPGTSSTGSP

SEQ ID NO: 643 - protein, 11 aa, Artificial Sequence
  Description of Artificial Sequence: Synthetic peptide
MASTPESGSSG

SEQ ID NO: 644 - DNA, 51 bp, Artificial Sequence
  Description of Artificial Sequence: Synthetic oligonucleotide
atggctagtccggctggctctccgacctccactgaggaaggtacttctact

SEQ ID NO: 645 - DNA, 51 bp, Artificial Sequence
  Description of Artificial Sequence: Synthetic oligonucleotide
atggctagtcctgctggctctccaacctccactgaggaaggtacttctact

SEQ ID NO: 646 - DNA, 51 bp, Artificial Sequence
  Description of Artificial Sequence: Synthetic oligonucleotide
atggctagtccagcaggctctcctacctccaccgaggaaggtacttctact

SEQ ID NO: 647 - DNA, 51 bp, Artificial Sequence
  Description of Artificial Sequence: Synthetic oligonucleotide
atggctagtcctgctggctctccgacctctactgaggaaggtacttctact

SEQ ID NO: 648 - DNA, 51 bp, Artificial Sequence
  Description of Artificial Sequence: Synthetic oligonucleotide
atggctacatccgaaagcgcaacccctgagtccggtccaggtacttctact

SEQ ID NO: 649 - DNA, 51 bp, Artificial Sequence
  Description of Artificial Sequence: Synthetic oligonucleotide
atggctacatccgaaagcgcaacccctgaatctggtccaggtacttctact

SEQ ID NO: 650 - DNA, 51 bp, Artificial Sequence
  Description of Artificial Sequence: Synthetic oligonucleotide
atggctacgtctgaaagcgctactccggaatctggtccaggtacttctact

SEQ ID NO: 651 - DNA, 51 bp, Artificial Sequence
  Description of Artificial Sequence: Synthetic oligonucleotide
atggctacgtccgaaagcgctacccctgaatccggtccaggtacttctact

SEQ ID NO: 652 - DNA, 51 bp, Artificial Sequence
  Description of Artificial Sequence: Synthetic oligonucleotide
atggctagttctaccccgtctggtgcaaccggttccccaggtacttctact

SEQ ID NO: 653 - DNA, 51 bp, Artificial Sequence
  Description of Artificial Sequence: Synthetic oligonucleotide
atggctagctccactccgtctggtgctaccggttccccaggtacttctact

SEQ ID NO: 654 - DNA, 51 bp, Artificial Sequence
  Description of Artificial Sequence: Synthetic oligonucleotide
atggctagctctactccgtctggtgctactggttccccaggtacttctact

SEQ ID NO: 655 - DNA, 51 bp, Artificial Sequence
  Description of Artificial Sequence: Synthetic oligonucleotide
atggctagttctaccccttctggtgctactggttctccaggtacttctact

SEQ ID NO: 656 - DNA, 180 bp, Artificial Sequence
  Description of Artificial Sequence: Synthetic polynucleotide
atggctagtcctgctggctctccaacctccactgaggaaggtgcatccccgggcaccagctctaccggttctccaggtagctctaccccgtctggtgctaccggctctccaggtagctctaccccgtctggtgctactggctctccaggtacttctactgaaccgtctgaaggcagcgca

SEQ ID NO: 657 - DNA, 180 bp, Artificial Sequence; identical to SEQ ID NO: 656
  Description of Artificial Sequence: Synthetic polynucleotide

SEQ ID NO: 658 - DNA, 180 bp, Artificial Sequence
  Description of Artificial Sequence: Synthetic polynucleotide
atggctagtcctgctggctctccaacctccactgaggaaggtacttctaccgaaccgtccgagggtagcgcaccaggtagcccagcaggttctcctacctccaccgaggaaggtacttctaccgaaccgtccgagggtagcgcaccaggtacttctactgaaccgtctgaaggcagcgca

SEQ ID NO: 659 - DNA, 180 bp, Artificial Sequence
  Description of Artificial Sequence: Synthetic polynucleotide
atggctagtcctgctggctctccgacctctactgaggaaggtacttctactgaaccgtctgaaggcagcgcaccaggtagcgaaccggctacttccggttctgaaaccccaggtagcccagcaggttctccaacttctactgaagaaggtacttctactgaaccgtctgaaggcagcgca

SEQ ID NO: 660 - DNA, 180 bp, Artificial Sequence
  Description of Artificial Sequence: Synthetic polynucleotide
atggctagtcctgctggctctccaacctccactgaggaaggtaccccgggtagcggtactgcttcttcctctccaggtagctctaccccttctggtgcaaccggctctccaggtgcttctccgggcaccagctctaccggttctccaggtacttctactgaaccgtctgaaggcagcgca

SEQ ID NO: 661 - DNA, 180 bp, Artificial Sequence; identical to SEQ ID NO: 659
  Description of Artificial Sequence: Synthetic polynucleotide

SEQ ID NO: 662 - DNA, 180 bp, Artificial Sequence
  Description of Artificial Sequence: Synthetic polynucleotide
atggctagtcctgctggctctccgacctctactgaggaaggtacctcccctagcggcgaatcttctactgctccaggtacctctcctagcggcgaatcttctaccgctccaggtacctcccctagcggtgaatcttctaccgcaccaggtacttctactgaaccgtctgaaggcagcgca

SEQ ID NO: 663 - DNA, 180 bp, Artificial Sequence
  Description of Artificial Sequence: Synthetic polynucleotide
atggctagtcctgctggctctccgacctctactgaggaaggtacctctactccggaaagcggttccgcatctccaggttctaccagcgaatccccgtctggcaccgcaccaggttctactagctctactgctgaatctccgggcccaggtacttctactgaaccgtctgaaggcagcgca

SEQ ID NO: 664 - DNA, 180 bp, Artificial Sequence; identical to SEQ ID NO: 662
  Description of Artificial Sequence: Synthetic polynucleotide

SEQ ID NO: 665 - DNA, 180 bp, Artificial Sequence; identical to SEQ ID NO: 663
  Description of Artificial Sequence: Synthetic polynucleotide

SEQ ID NO: 666 - DNA, 180 bp, Artificial Sequence
  Description of Artificial Sequence: Synthetic polynucleotide
atggctgaacctgctggctctccaacctccactgaggaaggtgcatccccgggcaccagctctaccggttctccaggtagctctaccccgtctggtgctaccggctctccaggtagctctaccccgtctggtgctactggctctccaggtacttctactgaaccgtctgaaggcagcgca

SEQ ID NO: 667 - DNA, 180 bp, Artificial Sequence
  Description of Artificial Sequence: Synthetic polynucleotide
atggctgaacctgctggctctccgacctctactgaggaaggtacctcccctagcggcgaatcttctactgctccaggtacctctcctagcggcgaatcttctaccgctccaggtacctcccctagcggtgaatcttctaccgcaccaggtacttctactgaaccgtctgaaggcagcgca

SEQ ID NO: 668 - DNA, 180 bp, Artificial Sequence
  Description of Artificial Sequence: Synthetic polynucleotide
atggctgaacctgctggctctccaacctccactgaggaaggtaccccgggtagcggtactgcttcttcctctccaggtagctctaccccttctggtgcaaccggctctccaggtgcttctccgggcaccagctctaccggttctccaggtagcccggctggctctcctacctctactgag

SEQ ID NO: 669 - DNA, 180 bp, Artificial Sequence
  Description of Artificial Sequence: Synthetic polynucleotide
atggctgaaactgctggctctccaacctccactgaggaaggtgcatccccgggcaccagctctaccggttctccaggtagctctaccccgtctggtgctaccggctctccaggtagctctaccccgtctggtgctactggctctccaggtagcccggctggctctcctacctctactgag

SEQ ID NO: 670 - DNA, 37 bp, Artificial Sequence
  Description of Artificial Sequence: Synthetic primer
ataaagggtctccaggtcgtccgtccggtcgtaaatc

SEQ ID NO: 671 - DNA, 36 bp, Artificial Sequence
  Description of Artificial Sequence: Synthetic primer
aactcgaagcttttattcgtcctcctggaagtaaaa

SEQ ID NO: 672 - protein, 8 aa, Artificial Sequence
  Description of Artificial Sequence: Synthetic peptide
LGPVSGVP

SEQ ID NO: 673 - protein, 8 aa, Artificial Sequence
  Description of Artificial Sequence: Synthetic peptide
GPAGLGGA

SEQ ID NO: 674 - protein, 7 aa, Artificial Sequence
  Description of Artificial Sequence: Synthetic peptide
KLTRAET

SEQ ID NO: 675 - protein, 36 aa, Artificial Sequence; identical to SEQ ID NO: 287
  Description of Artificial Sequence: Synthetic polypeptide

SEQ ID NO: 676 - protein, 36 aa, Artificial Sequence; identical to SEQ ID NO: 288
  Description of Artificial Sequence: Synthetic polypeptide

SEQ ID NO: 677 - protein, 36 aa, Artificial Sequence; identical to SEQ ID NO: 477
  Description of Artificial Sequence: Synthetic polypeptide

SEQ ID NO: 678 - protein, 36 aa, Artificial Sequence; identical to SEQ ID NO: 478
  Description of Artificial Sequence: Synthetic polypeptide

SEQ ID NO: 679 - protein, 42 aa, Artificial Sequence; identical to SEQ ID NO: 90
  Description of Artificial Sequence: Synthetic polypeptide

SEQ ID NO: 680 - protein, 42 aa, Artificial Sequence; identical to SEQ ID NO: 90
  Description of Artificial Sequence: Synthetic polypeptide

SEQ ID NO: 681 - protein, 42 aa, Artificial Sequence; identical to SEQ ID NO: 95
  Description of Artificial Sequence: Synthetic polypeptide

SEQ ID NO: 682 - protein, 42 aa, Artificial Sequence; identical to SEQ ID NO: 96
  Description of Artificial Sequence: Synthetic polypeptide

SEQ ID NO: 683 - protein, 144 aa, Artificial Sequence; identical to SEQ ID NO: 103
  Description of Artificial Sequence: Synthetic polypeptide

SEQ ID NO: 684 - protein, 144 aa, Artificial Sequence; identical to SEQ ID NO: 105
  Description of Artificial Sequence: Synthetic polypeptide

SEQ ID NO: 685 - protein, 288 aa, Artificial Sequence; identical to SEQ ID NO: 109
  Description of Artificial Sequence: Synthetic polypeptide

SEQ ID NO: 686 - protein, 288 aa, Artificial Sequence; identical to SEQ ID NO: 111
  Description of Artificial Sequence: Synthetic polypeptide

SEQ ID NO: 687 - protein, 504 aa, Artificial Sequence
  Description of Artificial Sequence: Synthetic polypeptide
GASPGTSSTGSPGSSPSASTGTGPGSSPSASTGTGPGTPGSGTASSSPGSSTPSGATGSPGSNPSASTGTGPGASPGTSSTGSPGTPGSGTASSSPGSSTPSGATGSPGTPGSGTASSSPGASPGTSSTGSPGASPGTSSTGSPGTPGSGTASSSPGSSTPSGATGSPGASPGTSSTGSPGTPGSGTASSSPGSSTPSGATGSPGSNPSASTGTGPGSSPSASTGTGPGSSTPSGATGSPGSSTPSGATGSPGASPGTSSTGSPGASPGTSSTGSPGASPGTSSTGSPGTPGSGTASSSPGASPGTSSTGSPGASPGTSSTGSPGASPGTSSTGSPGSSPSASTGTGPGTPGSGTASSSPGASPGTSSTGSPGASPGTSSTGSPGASPGTSSTGSPGSSTPSGATGSPGSSTPSGATGSPGASPGTSSTGSPGTPGSGTASSSPGSSTPSGATGSPGSSTPSGATGSPGSSTPSGATGSPGSSPSASTGTGPGASPGTSSTGSP

SEQ ID NO: 688 - protein, 576 aa, Artificial Sequence; identical to SEQ ID NO: 114
  Description of Artificial Sequence: Synthetic polypeptide

SEQ ID NO: 689 - protein, 576 aa, Artificial Sequence; identical to SEQ ID NO: 115
  Description of Artificial Sequence: Synthetic polypeptide

SEQ ID NO: 690 - protein, 576 aa, Artificial Sequence; identical to SEQ ID NO: 117
  Description of Artificial Sequence: Synthetic polypeptide

SEQ ID NO: 691 - protein, 540 aa, Artificial Sequence; identical to SEQ ID NO: 113
  Description of Artificial Sequence: Synthetic polypeptide

SEQ ID NO: 692 - protein, 836 aa, Artificial Sequence; identical to SEQ ID NO: 119
  Description of Artificial Sequence: Synthetic polypeptide

SEQ ID NO: 693 - protein, 864 aa, Artificial Sequence; identical to SEQ ID NO: 120
  Description of Artificial Sequence: Synthetic polypeptide

SEQ ID NO: 694 - protein, 875 aa, Artificial Sequence; identical to SEQ ID NO: 121
  Description of Artificial Sequence: Synthetic polypeptide
  MOD_RES (430)..(432): Any amino acid
  MOD_RES (443)..(446): Any amino acid

SEQ ID NO: 695 - protein, 864 aa, Artificial Sequence; identical to SEQ ID NO: 122
  Description of Artificial Sequence: Synthetic polypeptide

SEQ ID NO: 696 - protein, 875 aa, Artificial Sequence; identical to SEQ ID NO: 123
  Description of Artificial Sequence: Synthetic polypeptide

SEQ ID NO: 697 - protein, 1318 aa, Artificial Sequence; identical to SEQ ID NO: 126
  Description of Artificial Sequence: Synthetic polypeptide

SEQ ID NO: 698 - protein, 924 aa, Artificial Sequence; identical to SEQ ID NO: 125
  Description of Artificial Sequence: Synthetic polypeptide

SEQ ID NO: 699 - protein, 913 aa, Artificial Sequence; identical to SEQ ID NO: 124
  Description of Artificial Sequence: Synthetic polypeptide

SEQ ID NO: 700 - protein, 864 aa, Artificial Sequence; identical to SEQ ID NO: 127
  Description of Artificial Sequence: Synthetic polypeptide

SEQ ID NO: 701 - protein, 4 aa, Artificial Sequence
  Description of Artificial Sequence: Synthetic peptide
GGSG

SEQ ID NO: 702 - protein, 195 aa, Artificial Sequence
  Description of Artificial Sequence: Synthetic polypeptide
NNTNNTNNTNNTNNTNNTNNTNNTNNTNNTNNTNNTNNTNNTNNTNNTNNTNNTNNTNNTNNTNNTNNTNNTNNTNNTNNTNNTNNTNNTNNTNNTNNTNNTNNTNNTNNTNNTNNTNNTNNTNNTNNTNNTNNTNNTNNTNNTNNTNNTNNTNNTNNTNNTNNTNNTNNTNNTNNTNNTNNTNNTNNTNNTNNT

SEQ ID NO: 703 - protein, 288 aa, Artificial Sequence
  Description of Artificial Sequence: Synthetic polypeptide
GSGGEGGSGGSGGSGGEGGSGGSGGSGGEGGSGGSGGSGGEGGSGGSGGSGGEGGSGGSGGSGGEGGSGGSGGSGGEGGSGGSGGSGGEGGSGGSGGSGGEGGSGGSGGSGGEGGSGGSGGSGGEGGSGGSGGSGGEGGSGGSGGSGGEGGSGGSGGSGGEGGSGGSGGSGGEGGSGGSGGSGGEGGSGGSGGSGGEGGSGGSGGSGGEGGSGGSGGSGGEGGSGGSGGSGGEGGSGGSGGSGGEGGSGGSGGSGGEGGSGGSGGSGGEGGSGGSGGSGGEGGSGGSG

SEQ ID NO: 704 - protein, 288 aa, Artificial Sequence
  Description of Artificial Sequence: Synthetic polypeptide
GSGGEGGSGGEGGSGGEGGSGGEGGSGGEGGSGGEGGSGGEGGSGGEGGSGGEGGSGGEGGSGGEGGSGGEGGSGGEGGSGGEGGSGGEGGSGGEGGSGGEGGSGGEGGSGGEGGSGGEGGSGGEGGSGGEGGSGGEGGSGGEGGSGGEGGSGGEGGSGGEGGSGGEGGSGGEGGSGGEGGSGGEGGSGGEGGSGGEGGSGGEGGSGGEGGSGGEGGSGGEGGSGGEGGSGGEGGSGGEGGSGGEGGSGGEGGSGGEGGSGGEGGSGGEGGSGGEGGSGGEGGSGGEG

SEQ ID NO: 705 - protein, 288 aa, Artificial Sequence
  Description of Artificial Sequence: Synthetic polypeptide
GEGEGGGEGGEGEGGGEGGEGEGGGEGGEGEGGGEGGEGEGGGEGGEGEGGGEGGEGEGGGEGGEGEGGGEGGEGEGGGEGGEGEGGGEGGEGEGGGEGGEGEGGGEGGEGEGGGEGGEGEGGGEGGEGEGGGEGGEGEGGGEGGEGEGGGEGGEGEGGGEGGEGEGGGEGGEGEGGGEGGEGEGGGEGGEGEGGGEGGEGEGGGEGGEGEGGGEGGEGEGGGEGGEGEGGGEGGEGEGGGEGGEGEGGGEGGEGEGGGEGGEGEGGGEGGEGEGGGEGGEGEGGGEG

SEQ ID NO: 706 - protein, 288 aa, Artificial Sequence
  Description of Artificial Sequence: Synthetic polypeptide
SSESSESSSSESSSESSESSSSESSSESSESSSSESSSESSESSSSESSSESSESSSSESSSESSESSSSESSSESSESSSSESSSESSESSSSESSSESSESSSSESSSESSESSSSESSSESSESSSSESSSESSESSSSESSSESSESSSSESSSESSESSSSESSSESSESSSSESSSESSESSSSESSSESSESSSSESSSESSESSSSESSSESSESSSSESSSESSESSSSESSSESSESSSSESSSESSESSSSESSSESSESSSSESSSESSESSSSES

SEQ ID NO: 707 - protein, 288 aa, Artificial Sequence; identical to SEQ ID NO: 129
  Description of Artificial Sequence: Synthetic polypeptide

SEQ ID NO: 708 - protein, 576 aa, Artificial Sequence
  Description of Artificial Sequence: Synthetic polypeptide
GGKPGEGGKPEGGGGKPGGKPEGEGEGKPGGKPEGGGKPGGGEGGKPEGGKPEGEGKPGGGEGKPGGKPEGGGGKPEGEGKPGGGGGKPGGKPEGEGKPGGGEGGKPEGKPGEGGEGKPGGKPEGGGEGKPGGGKPGEGGKPGEGKPGGGEGGKPEGGKPEGEGKPGGGEGKPGGKPGEGGKPEGGGEGKPGGKPGEGGEGKPGGGKPEGEGKPGGGKPGGGEGGKPEGEGKPGGKPEGGGEGKPGGKPEGGGKPEGGGEGKPGGGKPGEGGKPGEGEGKPGGKPEGEGKPGGEGGGKPEGKPGGGEGGKPEGGKPGEGGKPEGGKPGEGGEGKPGGGKPGEGGKPEGGGKPEGEGKPGGGGKPGEGGKPEGGKPEGGGEGKPGGGKPEGEGKPGGGEGKPGGKPEGGGGKPGEGGKPEGGKPGGEGGGKPEGEGKPGGKPGEGGGGKPGGKPEGEGKPGEGGEGKPGGKPEGGGEGKPGGKPEGGGEGKPGGGKPGEGGKPEGGGKPGEGGKPGEGGKPEGEGKPGGGEGKPGGKPGEGGKPEGGGEGKPGGKPGGEGGGKPEGGKPGEGGKPEG

SEQ ID NO: 709 - protein, 558 aa, Artificial Sequence
  Description of Artificial Sequence: Synthetic polypeptide
GEGKPGGKPGSGGGKPGEGGKPGSGEGKPGGKPGSGGSGKPGGKPGEGGKPEGGSGGKPGGGGKPGGKPGGEGSGKPGGKPEGGGKPEGGSGGKPGGKPEGGSGGKPGGKPGSGEGGKPGGGKPGGEGKPGSGKPGGEGSGKPGGKPEGGSGGKPGGKPEGGSGGKPGGSGKPGGKPGEGGKPEGGSGGKPGGSGKPGGKPEGGGSGKPGGKPGEGGKPGSGEGGKPGGGKPGGEGKPGSGKPGGEGSGKPGGKPGSGGEGKPGGKPEGGSGGKPGGGKPGGEGKPGSGGKPGEGGKPGSGGGKPGGKPGGEGEGKPGGKPGEGGKPGGEGSGKPGGGGKPGGKPGGEGGKPEGSGKPGGGSGKPGGKPEGGGGKPEGSGKPGGGGKPEGSGKPGGGKPEGGSGGKPGGSGKPGGKPGEGGGKPEGSGKPGGGSGKPGGKPEGGGKPEGGSGGKPGGKPEGGSGGKPGGKPGGEGSGKPGGKPGSGEGGKPGGKPGEGSGGKPGGKPEGGSGGKPGGSGKPGGKPEGGGSGKPGGKPGEGGKPGGEGSGKPGGSGKPG

SEQ ID NO: 710 - protein, 577 aa, Artificial Sequence
  Description of Artificial Sequence: Synthetic polypeptide
GGSGKPGKPGGSGSGKPGSGKPGGGSGKPGSGKPGGGSGKPGSGKPGGGSGKPGSGKPGGGGKPGSGSGKPGGGKPGGSGGKPGGGSGKPGKPGSGGSGKPGSGKPGGGSGGKPGKPGSGGSGGKPGKPGSGGGSGKPGKPGSGGSGGKPGKPGSGGSGGKPGKPGSGGSGKPGSGKPGGGSGKPGSGKPGSGGSGKPGKPGSGGSGKPGSGKPGSGSGKPGSGKPGGGSGKPGSGKPGSGGSGKPGKPGSGGGKPGSGSGKPGGGKPGSGSGKPGGGKPGGSGGKPGGSGGKPGKPGSGGGSGKPGKPGSGGGSGKPGKPGGSGSGKPGSGKPGGGSGKPGSGKPGSGGSGKPGKPGSGGSGGKPGKPGSGGGKPGSGSGKPGGGKPGSGSGKPGGGKPGSGSGKPGGGKPGSGSGKPGGSGKPGSGKPGGGSGGKPGKPGSGGSGKPGSGKPGSGGSGKPGKPGGSGSGKPGSGKPGGGSGKPGSGKPGGGSGKPGSGKPGGGSGKPGSGKPGGGGKPGSGSGKPGGSGGKPGKPGSGGSGGKPGKPGSGGSGKPGSGKPGGGSGGKPGKPGSGG

SEQ ID NO: 711 - protein, 576 aa, Artificial Sequence; identical to SEQ ID NO: 130
  Description of Artificial Sequence: Synthetic polypeptide

SEQ ID NO: 712 - protein, 42 aa, Artificial Sequence; identical to SEQ ID NO: 90
  Description of Artificial Sequence: Synthetic polypeptide

SEQ ID NO: 713 - protein, 42 aa, Artificial Sequence; identical to SEQ ID NO: 91
  Description of Artificial Sequence: Synthetic polypeptide

SEQ ID NO: 714 - protein, 42 aa, Artificial Sequence; identical to SEQ ID NO: 92
  Description of Artificial Sequence: Synthetic polypeptide

SEQ ID NO: 715 - protein, 42 aa, Artificial Sequence; identical to SEQ ID NO: 95
  Description of Artificial Sequence: Synthetic polypeptide

SEQ ID NO: 716 - protein, 42 aa, Artificial Sequence; identical to SEQ ID NO: 96
  Description of Artificial Sequence: Synthetic polypeptide

SEQ ID NO: 717 - protein, 42 aa, Artificial Sequence; identical to SEQ ID NO: 97
  Description of Artificial Sequence: Synthetic polypeptide

SEQ ID NO: 718 - protein, 42 aa, Artificial Sequence; identical to SEQ ID NO: 98
  Description of Artificial Sequence: Synthetic polypeptide

SEQ ID NO: 719 - protein, 48 aa, Artificial Sequence; identical to SEQ ID NO: 101
  Description of Artificial Sequence: Synthetic polypeptide

SEQ ID NO: 720 - protein, 48 aa, Artificial Sequence; identical to SEQ ID NO: 102
  Description of Artificial Sequence: Synthetic polypeptide

SEQ ID NO: 721 - protein, 144 aa, Artificial Sequence; identical to SEQ ID NO: 103
  Description of Artificial Sequence: Synthetic polypeptide

SEQ ID NO: 722 - protein, 144 aa, Artificial Sequence; identical to SEQ ID NO: 104
  Description of Artificial Sequence: Synthetic polypeptide

SEQ ID NO: 723 - protein, 144 aa, Artificial Sequence; identical to SEQ ID NO: 105
  Description of Artificial Sequence: Synthetic polypeptide

SEQ ID NO: 724 - protein, 144 aa, Artificial Sequence; identical to SEQ ID NO: 106
  Description of Artificial Sequence: Synthetic polypeptide

SEQ ID NO: 725 - protein, 144 aa, Artificial Sequence; identical to SEQ ID NO: 107
  Description of Artificial Sequence: Synthetic polypeptide

SEQ ID NO: 726 - protein, 144 aa, Artificial Sequence; identical to SEQ ID NO: 108
  Description of Artificial Sequence: Synthetic polypeptide

SEQ ID NO: 727 - protein, 288 aa, Artificial Sequence; identical to SEQ ID NO: 109
  Description of Artificial Sequence: Synthetic polypeptide

SEQ ID NO: 728 - protein, 288 aa, Artificial Sequence; identical to SEQ ID NO: 110
  Description of Artificial Sequence: Synthetic polypeptide

SEQ ID NO: 729 - protein, 288 aa, Artificial Sequence; identical to SEQ ID NO: 111
  Description of Artificial Sequence: Synthetic polypeptide

SEQ ID NO: 730 - protein, 576 aa, Artificial Sequence; identical to SEQ ID NO: 114
  Description of Artificial Sequence: Synthetic polypeptide

SEQ ID NO: 731 - protein, 577 aa, Artificial Sequence
  Description of Artificial Sequence: Synthetic polypeptide
AGSPAGSPTSTEEGTSESATPESGPGTSTEPSEGSAPGSPAGSPTSTEEGTSTEPSEGSAPGTSTEPSEGSAPGTSESATPESGPGSEPATSGSETPGSEPATSGSETPGSPAGSPTSTEEGTSESATPESGPGTSTEPSEGSAPGTSTEPSEGSAPGSPAGSPTSTEEGTSTEPSEGSAPGTSTEPSEGSAPGTSESATPESGPGTSTEPSEGSAPGTSESATPESGPGSEPATSGSETPGTSTEPSEGSAPGTSTEPSEGSAPGTSESATPESGPGTSESATPESGPGSPAGSPTSTEEGTSESATPESGPGSEPATSGSETPGTSESATPESGPGTSTEPSEGSAPGTSTEPSEGSAPGTSTEPSEGSAPGTSTEPSEGSAPGTSTEPSEGSAPGTSTEPSEGSAPGSPAGSPTSTEEGTSTEPSEGSAPGTSESATPESGPGSEPATSGSETPGTSESATPESGPGSEPATSGSETPGTSESATPESGPGTSTEPSEGSAPGTSESATPESGPGSPAGSPTSTEEGSPAGSPTSTEEGSPAGSPTSTEEGTSESATPESGPGTSTEPSEGSAP

SEQ ID NO: 732 - protein, 540 aa, Artificial Sequence; identical to SEQ ID NO: 113
  Description of Artificial Sequence: Synthetic polypeptide

SEQ ID NO: 733 - protein, 504 aa, Artificial Sequence; identical to SEQ ID NO: 687
  Description of Artificial Sequence: Synthetic polypeptide

SEQ ID NO: 734 - protein, 576 aa, Artificial Sequence; identical to SEQ ID NO: 117
  Description of Artificial Sequence: Synthetic polypeptide

SEQ ID NO: 735 - protein, 836 aa, Artificial Sequence; identical to SEQ ID NO: 119
  Description of Artificial Sequence: Synthetic polypeptide

SEQ ID NO: 736 - protein, 816 aa, Artificial Sequence
  Description of Artificial Sequence: Synthetic polypeptide
GSPAGSPTSTEEGTSESATPESGPGTSTEPSEGSAPGSPAGSPTSTEEGTSTEPSEGSAPGTSTEPSEGSAPGTSESATPESGPGSEPATSGSETPGSEPATSGSETPGSPAGSPTSTEEGTSESATPESGPGTSTEPSEGSAPGTSTEPSEGSAPGSPAGSPTSTEEGTSTEPSEGSAPGTSTEPSEGSAPGTSESATPESGPGTSTEPSEGSAPGTSESATPESGPGSEPATSGSETPGTSTEPSEGSAPGTSTEPSEGSAPGTSESATPESGPGTSESATPESGPGSPAGSPTSTEEGTSESATPESGPGSEPATSGSETPGTSESATPESGPGTSTEPSEGSAPGTSTEPSEGSAPGTSTEPSEGSAPGTSTEPSEGSAPGTSTEPSEGSAPGTSTEPSEGSAPGSPAGSPTSTEEGTSTEPSEGSAPGTSESATPESGPGSEPATSGSETPGTSESATPESGPGSEPATSGSETPGTSESATPESGPGTSTEPSEGSAPGTSESATPESGPGSPAGSPTSTEEGSPAGSPTSTEEGSPAGSPTSTEEGTSESATPESGPGTSTEPSEGSAPGTSESATPESGPGSEPATSGSETPGTSESATPESGPGSEPATSGSETPGTSESATPESGPGTSTEPSEGSAPGSPAGSPTSTEEGTSESATPESGPGSEPATSGSETPGTSESATPESGPGSPAGSPTSTEEGSPAGSPTSTEEGTSTEPSEGSAPGTSESATPESGPGTSESATPESGPGTSESATPESGPGSEPATSGSETPGSEPATSGSETPGSPAGSPTSTEEGTSTEPSEGSAP

SEQ ID NO: 737 - protein, 875 aa, Artificial Sequence; identical to SEQ ID NO: 121
  Description of Artificial Sequence: Synthetic polypeptide
  MOD_RES (430)..(432): Any amino acid
  MOD_RES (443)..(446): Any amino acid

SEQ ID NO: 738 - protein, 864 aa, Artificial Sequence; identical to SEQ ID NO: 122
  Description of Artificial Sequence: Synthetic polypeptide

SEQ ID NO: 739 - protein, 875 aa, Artificial Sequence; identical to SEQ ID NO: 123
  Description of Artificial Sequence: Synthetic polypeptide

SEQ ID NO: 740 - protein, 1318 aa, Artificial Sequence; identical to SEQ ID NO: 126
  Description of Artificial Sequence: Synthetic polypeptide

SEQ ID NO: 741 - protein, 924 aa, Artificial Sequence; identical to SEQ ID NO: 125
  Description of Artificial Sequence: Synthetic polypeptide

SEQ ID NO: 742 - protein, 913 aa, Artificial Sequence; identical to SEQ ID NO: 124
  Description of Artificial Sequence: Synthetic polypeptide

SEQ ID NO: 743 - protein, 9 aa, Artificial Sequence
  Description of Artificial Sequence: Synthetic peptide
FDKLPRTSG

SEQ ID NO: 744 - protein, 7 aa, Artificial Sequence
  Description of Artificial Sequence: Synthetic peptide
FKLMVWY

SEQ ID NO: 745 - protein, 341 aa, Artificial Sequence
  Description of Artificial Sequence: Synthetic polypeptide
YRQSMNNFQGLRSFGCRFGTCTVQKLAHQIYQFTDKDKDNVAPRSKISPQGYGGTSESATPESGPGSEPATSGSETPGTSESATPESGPGSEPATSGSETPGTSESATPESGPGTSTEPSEGSAPGSPAGSPTSTEEGTSESATPESGPGSEPATSGSETPGTSESATPESGPGSPAGSPTSTEEGSPAGSPTSTEEGTSTEPSEGSAPGTSESATPESGPGTSESATPESGPGTSESATPESGPGSEPATSGSETPGSEPATSGSETPGSPAGSPTSTEEGTSTEPSEGSAPGTSTEPSEGSAPGSEPATSGSETPGTSESATPESGPGTSTEPSEGSAP

SEQ ID NO: 746 - protein, 629 aa, Artificial Sequence
  Description of Artificial Sequence: Synthetic polypeptide
YRQSMNNFQGLRSFGCRFGTCTVQKLAHQIYQFTDKDKDNVAPRSKISPQGYGGSPAGSPTSTEEGTSESATPESGPGTSTEPSEGSAPGSPAGSPTSTEEGTSTEPSEGSAPGTSTEPSEGSAPGTSESATPESGPGSEPATSGSETPGSEPATSGSETPGSPAGSPTSTEEGTSESATPESGPGTSTEPSEGSAPGTSTEPSEGSAPGSPAGSPTSTEEGTSTEPSEGSAPGTSTEPSEGSAPGTSESATPESGPGTSTEPSEGSAPGTSESATPESGPGSEPATSGSETPGTSTEPSEGSAPGTSTEPSEGSAPGTSESATPESGPGTSESATPESGPGSPAGSPTSTEEGTSESATPESGPGSEPATSGSETPGTSESATPESGPGTSTEPSEGSAPGTSTEPSEGSAPGTSTEPSEGSAPGTSTEPSEGSAPGTSTEPSEGSAPGTSTEPSEGSAPGSPAGSPTSTEEGTSTEPSEGSAPGTSESATPESGPGSEPATSGSETPGTSESATPESGPGSEPATSGSETPGTSESATPESGPGTSTEPSEGSAPGTSESATPESGPGSPAGSPTSTEEGSPAGSPTSTEEGSPAGSPTSTEEGTSESATPESGPGTSTEPSEGSAP

SEQ ID NO: 747 - protein, 629 aa, Artificial Sequence
  Description of Artificial Sequence: Synthetic polypeptide
YRQSMNNFQGLRSFGCRFGTCTVQKLAHQIYQFTDKDKDNVAPRSKISPQGYGGSTSSTAESPGPGSTSSTAESPGPGSTSESPSGTAPGSTSSTAESPGPGSTSSTAESPGPGTSTPESGSASPGSTSESPSGTAPGTSPSGESSTAPGSTSESPSGTAPGSTSESPSGTAPGTSPSGESSTAPGSTSESPSGTAPGSTSESPSGTAPGTSPSGESSTAPGSTSESPSGTAPGSTSESPSGTAPGSTSESPSGTAPGTSTPESGSASPGSTSESPSGTAPGTSTPESGSASPGSTSSTAESPGPGSTSSTAESPGPGTSTPESGSASPGTSTPESGSASPGSTSESPSGTAPGTSTPESGSASPGTSTPESGSASPGSTSESPSGTAPGSTSESPSGTAPGSTSESPSGTAPGSTSSTAESPGPGTSTPESGSASPGTSTPESGSASPGSTSESPSGTAPGSTSESPSGTAPGTSTPESGSASPGSTSESPSGTAPGSTSESPSGTAPGTSTPESGSASPGTSPSGESSTAPGSTSSTAESPGPGTSPSGESSTAPGSTSSTAESPGPGTSTPESGSASPGSTSESPSGTAPGSTSSTAESPGPGTSTPESGSASPGTSTPESGSASP

SEQ ID NO: 748 - protein, 889 aa, Artificial Sequence
  Description of Artificial Sequence: Synthetic polypeptide
YRQSMNNFQGLRSFGCRFGTCTVQKLAHQIYQFTDKDKDNVAPRSKISPQGYGGSSESGSSEGGPGSSESGSSEGGPGESPGGSSGSESGSGGEPSESGSSGESPGGSSGSESGESPGGSSGSESGSSESGSSEGGPGSSESGSSEGGPGSSESGSSEGGPGESPGGSSGSESGESPGGSSGSESGESPGGSSGSESGSSESGSSEGGPGSSESGSSEGGPGSSESGSSEGGPGSSESGSSEGGPGSSESGSSEGGPGSSESGSSEGGPGSGGEPSESGSSGESPGGSSGSESGESPGGSSGSESGSGGEPSESGSSGSEGSSGPGESSGSSESGSSEGGPGSGGEPSESGSSGSEGSSGPGESSGSSESGSSEGGPGSGGEPSESGSSGESPGGSSGSESGSGGEPSESGSSGSGGEPSESGSSGSSESGSSEGGPGSGGEPSESGSSGSGGEPSESGSSGSEGSSGPGESSGESPGGSSGSESGSEGSSGPGESSGSEGSSGPGESSGSGGEPSESGSSGSSESGSSEGGPGSSESGSSEGGPGESPGGSSGSESGSGGEPSESGSSGSEGSSGPGESSGESPGGSSGSESGSEGSSGPGSSESGSSEGGPGSGGEPSESGSSGSEGSSGPGESSGSEGSSGPGESSGSEGSSGPGESSGSGGEPSESGSSGSGGEPSESGSSGESPGGSSGSESGESPGGSSGSESGSGGEPSESGSSGSEGSSGPGESSGESPGGSSGSESGSSESGSSEGGPGSSESGSSEGGPGSSESGSSEGGPGSGGEPSESGSSGSSESGSSEGGPGESPGGSSGSESGSGGEPSESGSSGSSESGSSEGGPGESPGGSSGSESGSGGEPSESGSSGESPGGSSGSESGSGGEPSESGSS

SEQ ID NO: 749 - protein, 917 aa, Artificial Sequence
  Description of Artificial Sequence: Synthetic polypeptide
YRQSMNNFQGLRSFGCRFGTCTVQKLAHQIYQFTDKDKDNVAPRSKISPQGYGGSPAGSPTSTEEGTSESATPESGPGTSTEPSEGSAPGSPAGSPTSTEEGTSTEPSEGSAPGTSTEPSEGSAPGTSESATPESGPGSEPATSGSETPGSEPATSGSETPGSPAGSPTSTEEGTSESATPESGPGTSTEPSEGSAPGTSTEPSEGSAPGSPAGSPTSTEEGTSTEPSEGSAPGTSTEPSEGSAPGTSESATPESGPGTSTEPSEGSAPGTSESATPESGPGSEPATSGSETPGTSTEPSEGSAPGTSTEPSEGSAPGTSESATPESGPGTSESATPESGPGSPAGSPTSTEEGTSESATPESGPGSEPATSGSETPGTSESATPESGPGTSTEPSEGSAPGTSTEPSEGSAPGTSTEPSEGSAPGTSTEPSEGSAPGTSTEPSEGSAPGTSTEPSEGSAPGSPAGSPTSTEEGTSTEPSEGSAPGTSESATPESGPGSEPATSGSETPGTSESATPESGPGSEPATSGSETPGTSESATPESGPGTSTEPSEGSAPGTSESATPESGPGSPAGSPTSTEEGSPAGSPTSTEEGSPAGSPTSTEEGTSESATPESGPGTSTEPSEGSAPGTSESATPESGPGSEPATSGSETPGTSESATPESGPGSEPATSGSETPGTSESATPESGPGTSTEPSEGSAPGSPAGSPTSTEEGTSESATPESGPGSEPATSGSETPGTSESATPESGPGSPAGSPTSTEEGSPAGSPTSTEEGTSTEPSEGSAPGTSESATPESGPGTSESATPESGPGTSESATPESGPGSEPATSGSETPGSEPATSGSETPGSPAGSPTSTEEGTSTEPSEGSAPGTSTEPSEGSAPGSEPATSGSETPGTSESATPESGPGTSTEPSEGSAP

SEQ ID NO: 750 - protein, 928 aa, Artificial Sequence
  Description of Artificial Sequence: Synthetic polypeptide
  MOD_RES (483)..(485): Any amino acid
  MOD_RES (496)..(499): Any amino acid
YRQSMNNFQGLRSFGCRFGTCTVQKLAHQIYQFTDKDKDNVAPRSKISPQGYGGSTSESPSGTAPGTSPSGESSTAPGSTSESPSGTAPGSTSESPSGTAPGTSTPESGSASPGTSTPESGSASPGSTSESPSGTAPGSTSESPSGTAPGTSPSGESSTAPGSTSESPSGTAPGTSPSGESSTAPGTSPSGESSTAPGSTSSTAESPGPGTSPSGESSTAPGTSPSGESSTAPGSTSSTAESPGPGTSTPESGSASPGTSTPESGSASPGSTSESPSGTAPGSTSESPSGTAPGTSTPESGSASPGSTSSTAESPGPGTSTPESGSASPGSTSESPSGTAPGTSPSGESSTAPGSTSSTAESPGPGTSPSGESSTAPGTSTPESGSASPGSTSSTAESPGPGSTSSTAESPGPGSTSSTAESPGPGSTSSTAESPGPGTSPSGESSTAPGSTSESPSGTAPGSTSESPSGTAPGTSTPESGPXXXGASASGAPSTXXXXSESPSGTAPGSTSESPSGTAPGSTSESPSGTAPGSTSESPSGTAPGSTSESPSGTAPGSTSESPSGTAPGTSTPESGSASPGTSPSGESSTAPGTSPSGESSTAPGSTSSTAESPGPGTSPSGESSTAPGTSTPESGSASPGSTSESPSGTAPGSTSESPSGTAPGTSPSGESSTAPGSTSESPSGTAPGTSTPESGSASPGTSTPESGSASPGSTSESPSGTAPGTSTPESGSASPGSTSSTAESPGPGSTSESPSGTAPGSTSESPSGTAPGTSPSGESSTAPGSTSSTAESPGPGTSPSGESSTAPGTSTPESGSASPGTSPSGESSTAPGTSPSGESSTAPGTSPSGESSTAPGSTSSTAESPGPGSTSSTAESPGPGTSPSGESSTAPGSSPSASTGTGPGSSTPSGATGSPGSSTPSGATGSP

SEQ ID NO: 751 - protein, 917 aa, Artificial Sequence
  Description of Artificial Sequence: Synthetic polypeptide
YRQSMNNFQGLRSFGCRFGTCTVQKLAHQIYQFTDKDKDNVAPRSKISPQGYGGASPGTSSTGSPGSSPSASTGTGPGSSPSASTGTGPGTPGSGTASSSPGSSTPSGATGSPGSNPSASTGTGPGASPGTSSTGSPGTPGSGTASSSPGSSTPSGATGSPGTPGSGTASSSPGASPGTSSTGSPGASPGTSSTGSPGTPGSGTASSSPGSSTPSGATGSPGASPGTSSTGSPGTPGSGTASSSPGSSTPSGATGSPGSNPSASTGTGPGSSPSASTGTGPGSSTPSGATGSPGSSTPSGATGSPGASPGTSSTGSPGASPGTSSTGSPGASPGTSSTGSPGTPGSGTASSSPGASPGTSSTGSPGASPGTSSTGSPGASPGTSSTGSPGSSPSASTGTGPGTPGSGTASSSPGASPGTSSTGSPGASPGTSSTGSPGASPGTSSTGSPGSSTPSGATGSPGSSTPSGATGSPGASPGTSSTGSPGTPGSGTASSSPGSSTPSGATGSPGSSTPSGATGSPGSSTPSGATGSPGSSPSASTGTGPGASPGTSSTGSPGASPGTSSTGSPGTPGSGTASSSPGASPGTSSTGSPGASPGTSSTGSPGASPGTSSTGSPGASPGTSSTGSPGTPGSGTASSSPGSSTPSGATGSPGTPGSGTASSSPGSSTPSGATGSPGTPGSGTASSSPGSSTPSGATGSPGSSTPSGATGSPGSSPSASTGTGPGSSPSASTGTGPGASPGTSSTGSPGTPGSGTASSSPGSSTPSGATGSPGSSPSASTGTGPGSSPSASTGTGPGASPGTSSTGSPGASPGTSSTGSPGSSTPSGATGSPGSSPSASTGTGPGASPGTSSTGSPGSSPSASTGTGPGTPGSGTASSSPGSSTPSGATGSPGSSTPSGATGSPGASPGTSSTGSP

SEQ ID NO: 752 - protein, 928 aa, Artificial Sequence
  Description of Artificial Sequence: Synthetic polypeptide
YRQSMNNFQGLRSFGCRFGTCTVQKLAHQIYQFTDKDKDNVAPRSKISPQGYGGTSTEPSEGSAPGSEPATSGSETPGSPAGSPTSTEEGSTSSTAESPGPGTSTPESGSASPGSTSESPSGTAPGSTSESPSGTAPGTSTPESGSASPGTSTPESGSASPGSEPATSGSETPGTSESATPESGPGSPAGSPTSTEEGTSTEPSEGSAPGTSESATPESGPGTSTEPSEGSAPGTSTEPSEGSAPGSPAGSPTSTEEGTSTEPSEGSAPGTSTEPSEGSAPGTSESATPESGPGTSESATPESGPGTSTEPSEGSAPGTSTEPSEGSAPGTSESATPESGPGTSTEPSEGSAPGSEPATSGSETPGSPAGSPTSTEEGSSTPSGATGSPGTPGSGTASSSPGSSTPSGATGSPGTSTEPSEGSAPGTSTEPSEGSAPGSEPATSGSETPGSPAGSPTSTEEGSPAGSPTSTEEGTSTEPSEGSAPGASASGAPSTGGTSESATPESGPGSPAGSPTSTEEGSPAGSPTSTEEGSTSSTAESPGPGSTSESPSGTAPGTSPSGESSTAPGTPGSGTASSSPGSSTPSGATGSPGSSPSASTGTGPGSEPATSGSETPGTSESATPESGPGSEPATSGSETPGSTSSTAESPGPGSTSSTAESPGPGTSPSGESSTAPGSEPATSGSETPGSEPATSGSETPGTSTEPSEGSAPGSTSSTAESPGPGTSTPESGSASPGSTSESPSGTAPGTSTEPSEGSAPGTSTEPSEGSAPGTSTEPSEGSAPGSSTPSGATGSPGSSPSASTGTGPGASPGTSSTGSPGSEPATSGSETPGTSESATPESGPGSPAGSPTSTEEGSSTPSGATGSPGSSPSASTGTGPGASPGTSSTGSPGTSESATPESGPGTSTEPSEGSAPGTSTEPSEGSAP

SEQ ID NO: 753 - protein, 966 aa, Artificial Sequence
  Description of Artificial Sequence: Synthetic polypeptide
MAEPAGSPTSTEEGTPGSGTASSSPGSSTPSGATGSPGASPGTSSTGSPGSPAGSPTSTEEGTSESATPESGPGTSTEPSEGSAPGSPAGSPTSTEEGTSTEPSEGSAPGTSTEPSEGSAPGTSESATPESGPGSEPATSGSETPGSEPATSGSETPGSPAGSPTSTEEGTSESATPESGPGTSTEPSEGSAPGTSTEPSEGSAPGSPAGSPTSTEEGTSTEPSEGSAPGTSTEPSEGSAPGTSESATPESGPGTSTEPSEGSAPGTSESATPESGPGSEPATSGSETPGTSTEPSEGSAPGTSTEPSEGSAPGTSESATPESGPGTSESATPESGPGSPAGSPTSTEEGTSESATPESGPGSEPATSGSETPGTSESATPESGPGTSTEPSEGSAPGTSTEPSEGSAPGTSTEPSEGSAPGTSTEPSEGSAPGTSTEPSEGSAPGTSTEPSEGSAPGSPAGSPTSTEEGTSTEPSEGSAPGTSESATPESGPGSEPATSGSETPGTSESATPESGPGSEPATSGSETPGTSESATPESGPGTSTEPSEGSAPGTSESATPESGPGSPAGSPTSTEEGSPAGSPTSTEEGSPAGSPTSTEEGTSESATPESGPGTSTEPSEGSAPGTSESATPESGPGSEPATSGSETPGTSESATPESGPGSEPATSGSETPGTSESATPESGPGTSTEPSEGSAPGSPAGSPTSTEEGTSESATPESGPGSEPATSGSETPGTSESATPESGPGSPAGSPTSTEEGSPAGSPTSTEEGTSTEPSEGSAPGTSESATPESGPGTSESATPESGPGTSESATPESGPGSEPATSGSETPGSEPATSGSETPGSPAGSPTSTEEGTSTEPSEGSAPGTSTEPSEGSAPGSEPATSGSETPGTSESATPESGPGTSTEPSEGSAPGYRQSMNNFQGLRSFGCRFGTCTVQKLAHQIYQFTDKDKDNVAPRSKISPQGY

SEQ ID NO: 754 - protein, 977 aa, Artificial Sequence
  Description of Artificial Sequence: Synthetic polypeptide
MAEPAGSPTSTEEGASPGTSSTGSPGSSTPSGATGSPGSSTPSGATGSPGTSTEPSEGSAPGSEPATSGSETPGSPAGSPTSTEEGSTSSTAESPGPGTSTPESGSASPGSTSESPSGTAPGSTSESPSGTAPGTSTPESGSASPGTSTPESGSASPGSEPATSGSETPGTSESATPESGPGSPAGSPTSTEEGTSTEPSEGSAPGTSESATPESGPGTSTEPSEGSAPGTSTEPSEGSAPGSPAGSPTSTEEGTSTEPSEGSAPGTSTEPSEGSAPGTSESATPESGPGTSESATPESGPGTSTEPSEGSAPGTSTEPSEGSAPGTSESATPESGPGTSTEPSEGSAPGSEPATSGSETPGSPAGSPTSTEEGSSTPSGATGSPGTPGSGTASSSPGSSTPSGATGSPGTSTEPSEGSAPGTSTEPSEGSAPGSEPATSGSETPGSPAGSPTSTEEGSPAGSPTSTEEGTSTEPSEGSAPGASASGAPSTGGTSESATPESGPGSPAGSPTSTEEGSPAGSPTSTEEGSTSSTAESPGPGSTSESPSGTAPGTSPSGESSTAPGTPGSGTASSSPGSSTPSGATGSPGSSPSASTGTGPGSEPATSGSETPGTSESATPESGPGSEPATSGSETPGSTSSTAESPGPGSTSSTAESPGPGTSPSGESSTAPGSEPATSGSETPGSEPATSGSETPGTSTEPSEGSAPGSTSSTAESPGPGTSTPESGSASPGSTSESPSGTAPGTSTEPSEGSAPGTSTEPSEGSAPGTSTEPSEGSAPGSSTPSGATGSPGSSPSASTGTGPGASPGTSSTGSPGSEPATSGSETPGTSESATPESGPGSPAGSPTSTEEGSSTPSGATGSPGSSPSASTGTGPGASPGTSSTGSPGTSESATPESGPGTSTEPSEGSAPGTSTEPSEGSAPGYRQSMNNFQGLRSFGCRFGTCTVQKLAHQIYQFTDKDKDNVAPRSKISPQGY

SEQ ID NO: 755 - protein, 197 aa, Artificial Sequence
  Description of Artificial Sequence: Synthetic polypeptide
GSEPATSGSETPGTSESATPESGPGSEPATSGSETPGSPAGSPTSTEEGTSTEPSEGSAPGSEPATSGSETPGSEPATSGSETPGSEPATSGSETPGTSTEPSEGSAPGTSESATPESGPGSEPATSGSETPGTSTEPSEGSAPGYRQSMNNFQGLRSFGCRFGTCTVQKLAHQIYQFTDKDKDNVAPRSKISPQGY

SEQ ID NO: 756 - protein, 341 aa, Artificial Sequence
  Description of Artificial Sequence: Synthetic polypeptide
GTSESATPESGPGSEPATSGSETPGTSESATPESGPGSEPATSGSETPGTSESATPESGPGTSTEPSEGSAPGSPAGSPTSTEEGTSESATPESGPGSEPATSGSETPGTSESATPESGPGSPAGSPTSTEEGSPAGSPTSTEEGTSTEPSEGSAPGTSESATPESGPGTSESATPESGPGTSESATPESGPGSEPATSGSETPGSEPATSGSETPGSPAGSPTSTEEGTSTEPSEGSAPGTSTEPSEGSAPGSEPATSGSETPGTSESATPESGPGTSTEPSEGSAPGYRQSMNNFQGLRSFGCRFGTCTVQKLAHQIYQFTDKDKDNVAPRSKISPQGY

SEQ ID NO: 757 - protein, 629 aa, Artificial Sequence
  Description of Artificial Sequence: Synthetic polypeptide
GSPAGSPTSTEEGTSESATPESGPGTSTEPSEGSAPGSPAGSPTSTEEGTSTEPSEGSAPGTSTEPSEGSAPGTSESATPESGPGSEPATSGSETPGSEPATSGSETPGSPAGSPTSTEEGTSESATPESGPGTSTEPSEGSAPGTSTEPSEGSAPGSPAGSPTSTEEGTSTEPSEGSAPGTSTEPSEGSAPGTSESATPESGPGTSTEPSEGSAPGTSESATPESGPGSEPATSGSETPGTSTEPSEGSAPGTSTEPSEGSAPGTSESATPESGPGTSESATPESGPGSPAGSPTSTEEGTSESATPESGPGSEPATSGSETPGTSESATPESGPGTSTEPSEGSAPGTSTEPSEGSAPGTSTEPSEGSAPGTSTEPSEGSAPGTSTEPSEGSAPGTSTEPSEGSAPGSPAGSPTSTEEGTSTEPSEGSAPGTSESATPESGPGSEPATSGSETPGTSESATPESGPGSEPATSGSETPGTSESATPESGPGTSTEPSEGSAPGTSESATPESGPGSPAGSPTSTEEGSPAGSPTSTEEGSPAGSPTSTEEGTSESATPESGPGTSTEPSEGSAPGYRQSMNNFQGLRSFGCRFGTCTVQKLAHQIYQFTDKDKDNVAPRSKISPQGY

SEQ ID NO: 758 - protein, 629 aa, Artificial Sequence
  Description of Artificial Sequence: Synthetic polypeptide
GSTSSTAESPGPGSTSSTAESPGPGSTSESPSGTAPGSTSSTAESPGPGSTSSTAESPGPGTSTPESGSASPGSTSESPSGTAPGTSPSGESSTAPGSTSESPSGTAPGSTSESPSGTAPGTSPSGESSTAPGSTSESPSGTAPGSTSESPSGTAPGTSPSGESSTAPGSTSESPSGTAPGSTSESPSGTAPGSTSESPSGTAPGTSTPESGSASPGSTSESPSGTAPGTSTPESGSASPGSTSSTAESPGPGSTSSTAESPGPGTSTPESGSASPGTSTPESGSASPGSTSESPSGTAPGTSTPESGSASPGTSTPESGSASPGSTSESPSGTAPGSTSESPSGTAPGSTSESPSGTAPGSTSSTAESPGPGTSTPESGSASPGTSTPESGSASPGSTSESPSGTAPGSTSESPSGTAPGTSTPESGSASPGSTSESPSGTAPGSTSESPSGTAPGTSTPESGSASPGTSPSGESSTAPGSTSSTAESPGPGTSPSGESSTAPGSTSSTAESPGPGTSTPESGSASPGSTSESPSGTAPGSTSSTAESPGPGTSTPESGSASPGTSTPESGSASPGYRQSMNNFQGLRSFGCRFGTCTVQKLAHQIYQFTDKDKDNVAPRSKISPQGY

SEQ ID NO: 759 - protein, 889 aa, Artificial Sequence
  Description of Artificial Sequence: Synthetic polypeptide
GSSESGSSEGGPGSSESGSSEGGPGESPGGSSGSESGSGGEPSESGSSGESPGGSSGSESGESPGGSSGSESGSSESGSSEGGPGSSESGSSEGGPGSSESGSSEGGPGESPGGSSGSESGESPGGSSGSESGESPGGSSGSESGSSESGSSEGGPGSSESGSSEGGPGSSESGSSEGGPGSSESGSSEGGPGSSESGSSEGGPGSSESGSSEGGPGSGGEPSESGSSGESPGGSSGSESGESPGGSSGSESGSGGEPSESGSSGSEGSSGPGESSGSSESGSSEGGPGSGGEPSESGSSGSEGSSGPGESSGSSESGSSEGGPGSGGEPSESGSSGESPGGSSGSESGSGGEPSESGSSGSGGEPSESGSSGSSESGSSEGGPGSGGEPSESGSSGSGGEPSESGSSGSEGSSGPGESSGESPGGSSGSESGSEGSSGPGESSGSEGSSGPGESSGSGGEPSESGSSGSSESGSSEGGPGSSESGSSEGGPGESPGGSSGSESGSGGEPSESGSSGSEGSSGPGESSGESPGGSSGSESGSEGSSGPGSSESGSSEGGPGSGGEPSESGSSGSEGSSGPGESSGSEGSSGPGESSGSEGSSGPGESSGSGGEPSESGSSGSGGEPSESGSSGESPGGSSGSESGESPGGSSGSESGSGGEPSESGSSGSEGSSGPGESSGESPGGSSGSESGSSESGSSEGGPGSSESGSSEGGPGSSESGSSEGGPGSGGEPSESGSSGSSESGSSEGGPGESPGGSSGSESGSGGEPSESGSSGSSESGSSEGGPGESPGGSSGSESGSGGEPSESGSSGESPGGSSGSESGSGGEPSESGSSGYRQSMNNFQGLRSFGCRFGTCTVQKLAHQIYQFTDKDKDNVAPRSKISPQGY

SEQ ID NO: 760 - protein, 917 aa, Artificial Sequence
  Description of Artificial Sequence: Synthetic polypeptide
GSPAGSPTSTEEGTSESATPESGPGTSTEPSEGSAPGSPAGSPTSTEEGTSTEPSEGSAPGTSTEPSEGSAPGTSESATPESGPGSEPATSGSETPGSEPATSGSETPGSPAGSPTSTEEGTSESATPESGPGTSTEPSEGSAPGTSTEPSEGSAPGSPAGSPTSTEEGTSTEPSEGSAPGTSTEPSEGSAPGTSESATPESGPGTSTEPSEGSAPGTSESATPESGPGSEPATSGSETPGTSTEPSEGSAPGTSTEPSEGSAPGTSESATPESGPGTSESATPESGPGSPAGSPTSTEEGTSESATPESGPGSEPATSGSETPGTSESATPESGPGTSTEPSEGSAPGTSTEPSEGSAPGTSTEPSEGSAPGTSTEPSEGSAPGTSTEPSEGSAPGTSTEPSEGSAPGSPAGSPTSTEEGTSTEPSEGSAPGTSESATPESGPGSEPATSGSETPGTSESATPESGPGSEPATSGSETPGTSESATPESGPGTSTEPSEGSAPGTSESATPESGPGSPAGSPTSTEEGSPAGSPTSTEEGSPAGSPTSTEEGTSESATPESGPGTSTEPSEGSAPGTSESATPESGPGSEPATSGSETPGTSESATPESGPGSEPATSGSETPGTSESATPESGPGTSTEPSEGSAPGSPAGSPTSTEEGTSESATPESGPGSEPATSGSETPGTSESATPESGPGSPAGSPTSTEEGSPAGSPTSTEEGTSTEPSEGSAPGTSESATPESGPGTSESATPESGPGTSESATPESGPGSEPATSGSETPGSEPATSGSETPGSPAGSPTSTEEGTSTEPSEGSAPGTSTEPSEGSAPGSEPATSGSETPGTSESATPESGPGTSTEPSEGSAPGYRQSMNNFQGLRSFGCRFGTCTVQKLAHQIYQFTDKDKDNVAPRSKISPQGY

SEQ ID NO: 761 - protein, 928 aa, Artificial Sequence
  Description of Artificial Sequence: Synthetic polypeptide
  MOD_RES (430)..(432): Any amino acid
  MOD_RES (443)..(446): Any amino acid
GSTSESPSGTAPGTSPSGESSTAPGSTSESPSGTAPGSTSESPSGTAPGTSTPESGSASPGTSTPESGSASPGSTSESPSGTAPGSTSESPSGTAPGTSPSGESSTAPGSTSESPSGTAPGTSPSGESSTAPGTSPSGESSTAPGSTSSTAESPGPGTSPSGESSTAPGTSPSGESSTAPGSTSSTAESPGPGTSTPESGSASPGTSTPESGSASPGSTSESPSGTAPGSTSESPSGTAPGTSTPESGSASPGSTSSTAESPGPGTSTPESGSASPGSTSESPSGTAPGTSPSGESSTAPGSTSSTAESPGPGTSPSGESSTAPGTSTPESGSASPGSTSSTAESPGPGSTSSTAESPGPGSTSSTAESPGPGSTSSTAESPGPGTSPSGESSTAPGSTSESPSGTAPGSTSESPSGTAPGTSTPESGPXXXGASASGAPSTXXXXSESPSGTAPGSTSESPSGTAPGSTSESPSGTAPGSTSESPSGTAPGSTSESPSGTAPGSTSESPSGTAPGTSTPESGSASPGTSPSGESSTAPGTSPSGESSTAPGSTSSTAESPGPGTSPSGESSTAPGTSTPESGSASPGSTSESPSGTAPGSTSESPSGTAPGTSPSGESSTAPGSTSESPSGTAPGTSTPESGSASPGTSTPESGSASPGSTSESPSGTAPGTSTPESGSASPGSTSSTAESPGPGSTSESPSGTAPGSTSESPSGTAPGTSPSGESSTAPGSTSSTAESPGPGTSPSGESSTAPGTSTPESGSASPGTSPSGESSTAPGTSPSGESSTAPGTSPSGESSTAPGSTSSTAESPGPGSTSSTAESPGPGTSPSGESSTAPGSSPSASTGTGPGSSTPSGATGSPGSSTPSGATGSPGYRQSMNNFQGLRSFGCRFGTCTVQKLAHQIYQFTDKDKDNVAPRSKISPQGY

SEQ ID NO: 762 - protein, 917 aa, Artificial Sequence
  Description of Artificial Sequence: Synthetic polypeptide
GASPGTSSTGSPGSSPSASTGTGPGSSPSASTGTGPGTPGSGTASSSPGSSTPSGATGSPGSNPSASTGTGPGASPGTSSTGSPGTPGSGTASSSPGSSTPSGATGSPGTPGSGTASSSPGASPGTSSTGSPGASPGTSSTGSPGTPGSGTASSSPGSSTPSGATGSPGASPGTSSTGSPGTPGSGTASSSPGSSTPSGATGSPGSNPSASTGTGPGSSPSASTGTGPGSSTPSGATGSPGSSTPSGATGSPGASPGTSSTGSPGASPGTSSTGSPGASPGTSSTGSPGTPGSGTASSSPGASPGTSSTGSPGASPGTSSTGSPGASPGTSSTGSPGSSPSASTGTGPGTPGSGTASSSPGASPGTSSTGSPGASPGTSSTGSPGASPGTSSTGSPGSSTPSGATGSPGSSTPSGATGSPGASPGTSSTGSPGTPGSGTASSSPGSSTPSGATGSPGSSTPSGATGSPGSSTPSGATGSPGSSPSASTGTGPGASPGTSSTGSPGASPGTSSTGSPGTPGSGTASSSPGASPGTSSTGSPGASPGTSSTGSPGASPGTSSTGSPGASPGTSSTGSPGTPGSGTASSSPGSSTPSGATGSPGTPGSGTASSSPGSSTPSGATGSPGTPGSGTASSSPGSSTPSGATGSPGSSTPSGATGSPGSSPSASTGTGPGSSPSASTGTGPGASPGTSSTGSPGTPGSGTASSSPGSSTPSGATGSPGSSPSASTGTGPGSSPSASTGTGPGASPGTSSTGSPGASPGTSSTGSPGSSTPSGATGSPGSSPSASTGTGPGASPGTSSTGSPGSSPSASTGTGPGTPGSGTASSSPGSSTPSGATGSPGSSTPSGATGSPGASPGTSSTGSPGYRQSMNNFQGLRSFGCRFGTCTVQKLAHQIYQFTDKDKDNVAPRSKISPQGY

SEQ ID NO: 763 - protein, 928 aa, Artificial Sequence
  Description of Artificial Sequence: Synthetic polypeptide
GTSTEPSEGSAPGSEPATSGSETPGSPAGSPTSTEEGSTSSTAESPGPGTSTPESGSASPGSTSESPSGTAPGSTSESPSGTAPGTSTPESGSASPGTSTPESGSASPGSEPATSGSETPGTSESATPESGPGSPAGSPTSTEEGTSTEPSEGSAPGTSESATPESGPGTSTEPSEGSAPGTSTEPSEGSAPGSPAGSPTSTEEGTSTEPSEGSAPGTSTEPSEGSAPGTSESATPESGPGTSESATPESGPGTSTEPSEGSAPGTSTEPSEGSAPGTSESATPESGPGTSTEPSEGSAPGSEPATSGSETPGSPAGSPTSTEEGSSTPSGATGSPGTPGSGTASSSPGSSTPSGATGSPGTSTEPSEGSAPGTSTEPSEGSAPGSEPATSGSETPGSPAGSPTSTEEGSPAGSPTSTEEGTSTEPSEGSAPGASASGAPSTGGTSESATPESGPGSPAGSPTSTEEGSPAGSPTSTEEGSTSSTAESPGPGSTSESPSGTAPGTSPSGESSTAPGTPGSGTASSSPGSSTPSGATGSPGSSPSASTGTGPGSEPATSGSETPGTSESATPESGPGSEPATSGSETPGSTSSTAESPGPGSTSSTAESPGPGTSPSGESSTAPGSEPATSGSETPGSEPATSGSETPGTSTEPSEGSAPGSTSSTAESPGPGTSTPESGSASPGSTSESPSGTAPGTSTEPSEGSAPGTSTEPSEGSAPGTSTEPSEGSAPGSSTPSGATGSPGSSPSASTGTGPGASPGTSSTGSPGSEPATSGSETPGTSESATPESGPGSPAGSPTSTEEGSSTPSGATGSPGSSPSASTGTGPGASPGTSSTGSPGTSESATPESGPGTSTEPSEGSAPGTSTEPSEGSAPGYRQSMNNFQGLRSFGCRFGTCTVQKLAHQIYQFTDKDKDNVAPRSKISPQGY

SEQ ID NO: 764 - protein, 182 aa, Artificial Sequence
  Description of Artificial Sequence: Synthetic polypeptide
KCNTATCATQRLANFLVHSSNNFGAILSSTNVGSNTYGGSEPATSGSETPGTSESATPESGPGSEPATSGSETPGSPAGSPTSTEEGTSTEPSEGSAPGSEPATSGSETPGSEPATSGSETPGSEPATSGSETPGTSTEPSEGSAPGTSESATPESGPGSEPATSGSETPGTSTEPSEGSAP

SEQ ID NO: 765 - protein, 182 aa, Artificial Sequence
  Description of Artificial Sequence: Synthetic polypeptide
KCNTATCATQRLANFLVHSSNNFGAILSSTNVGSNTYGGTSTPESGSASPGTSPSGESSTAPGTSPSGESSTAPGSTSSTAESPGPGSTSESPSGTAPGSTSSTAESPGPGTSPSGESSTAPGTSTPESGSASPGSTSSTAESPGPGTSPSGESSTAPGTSPSGESSTAPGTSPSGESSTAP

SEQ ID NO: 766 - protein, 326 aa, Artificial Sequence
  Description of Artificial Sequence: Synthetic polypeptide
KCNTATCATQRLANFLVHSSNNFGAILSSTNVGSNTYGGTSESATPESGPGSEPATSGSETPGTSESATPESGPGSEPATSGSETPGTSESATPESGPGTSTEPSEGSAPGSPAGSPTSTEEGTSESATPESGPGSEPATSGSETPGTSESATPESGPGSPAGSPTSTEEGSPAGSPTSTEEGTSTEPSEGSAPGTSESATPESGPGTSESATPESGPGTSESATPESGPGSEPATSGSETPGSEPATSGSETPGSPAGSPTSTEEGTSTEPSEGSAPGTSTEPSEGSAPGSEPATSGSETPGTSESATPESGPGTSTEPSEGSAP

SEQ ID NO: 767 - protein, 614 aa, Artificial Sequence
  Description of Artificial Sequence: Synthetic polypeptide
KCNTATCATQRLANFLVHSSNNFGAILSSTNVGSNTYGGSPAGSPTSTEEGTSESATPESGPGTSTEPSEGSAPGSPAGSPTSTEEGTSTEPSEGSAPGTSTEPSEGSAPGTSESATPESGPGSEPATSGSETPGSEPATSGSETPGSPAGSPTSTEEGTSESATPESGPGTSTEPSEGSAPGTSTEPSEGSAPGSPAGSPTSTEEGTSTEPSEGSAPGTSTEPSEGSAPGTSESATPESGPGTSTEPSEGSAPGTSESATPESGPGSEPATSGSETPGTSTEPSEGSAPGTSTEPSEGSAPGTSESATPESGPGTSESATPESGPGSPAGSPTSTEEGTSESATPESGPGSEPATSGSETPGTSESATPESGPGTSTEPSEGSAPGTSTEPSEGSAPGTSTEPSEGSAPGTSTEPSEGSAPGTSTEPSEGSAPGTSTEPSEGSAPGSPAGSPTSTEEGTSTEPSEGSAPGTSESATPESGPGSEPATSGSETPGTSESATPESGPGSEPATSGSETPGTSESATPESGPGTSTEPSEGSAPGTSESATPESGPGSPAGSPTSTEEGSPAGSPTSTEEGSPAGSPTSTEEGTSESATPESGPGTSTEPSEGSAP

SEQ ID NO: 768 - protein, 614 aa, Artificial Sequence
  Description of Artificial Sequence: Synthetic polypeptide
KCNTATCATQRLANFLVHSSNNFGAILSSTNVGSNTYGGSTSSTAESPGPGSTSSTAESPGPGSTSESPSGTAPGSTSSTAESPGPGSTSSTAESPGPGTSTPESGSASPGSTSESPSGTAPGTSPSGESSTAPGSTSESPSGTAPGSTSESPSGTAPGTSPSGESSTAPGSTSESPSGTAPGSTSESPSGTAPGTSPSGESSTAPGSTSESPSGTAPGSTSESPSGTAPGSTSESPSGTAPGTSTPESGSASPGSTSESPSGTAPGTSTPESGSASPGSTSSTAESPGPGSTSSTAESPGPGTSTPESGSASPGTSTPESGSASPGSTSESPSGTAPGTSTPESGSASPGTSTPESGSASPGSTSESPSGTAPGSTSESPSGTAPGSTSESPSGTAPGSTSSTAESPGPGTSTPESGSASPGTSTPESGSASPGSTSESPSGTAPGSTSESPSGTAPGTSTPESGSASPGSTSESPSGTAPGSTSESPSGTAPGTSTPESGSASPGTSPSGESSTAPGSTSSTAESPGPGTSPSGESSTAPGSTSSTAESPGPGTSTPESGSASPGSTSESPSGTAPGSTSSTAESPGPGTSTPESGSASPGTSTPESGSASP

SEQ ID NO: 769 - protein, 874 aa, Artificial Sequence
  Description of Artificial Sequence: Synthetic polypeptide
KCNTATCATQRLANFLVHSSNNFGAILSSTNVGSNTYGGSSESGSSEGGPGSSESGSSEGGPGESPGGSSGSESGSGGEPSESGSSGESPGGSSGSESGESPGGSSGSESGSSESGSSEGGPGSSESGSSEGGPGSSESGSSEGGPGESPGGSSGSESGESPGGSSGSESGESPGGSSGSESGSSESGSSEGGPGSSESGSSEGGPGSSESGSSEGGPGSSESGSSEGGPGSSESGSSEGGPGSSESGSSEGGPGSGGEPSESGSSGESPGGSSGSESGESPGGSSGSESGSGGEPSESGSSGSEGSSGPGESSGSSESGSSEGGPGSGGEPSESGSSGSEGSSGPGESSGSSESGSSEGGPGSGGEPSESGSSGESPGGSSGSESGSGGEPSESGSSGSGGEPSESGSSGSSESGSSEGGPGSGGEPSESGSSGSGGEPSESGSSGSEGSSGPGESSGESPGGSSGSESGSEGSSGPGESSGSEGSSGPGESSGSGGEPSESGSSGSSESGSSEGGPGSSESGSSEGGPGESPGGSSGSESGSGGEPSESGSSGSEGSSGPGESSGESPGGSSGSESGSEGSSGPGSSESGSSEGGPGSGGEPSESGSSGSEGSSGPGESSGSEGSSGPGESSGSEGSSGPGESSGSGGEPSESGSSGSGGEPSESGSSGESPGGSSGSESGESPGGSSGSESGSGGEPSESGSSGSEGSSGPGESSGESPGGSSGSESGSSESGSSEGGPGSSESGSSEGGPGSSESGSSEGGPGSGGEPSESGSSGSSESGSSEGGPGESPGGSSGSESGSGGEPSESGSSGSSESGSSEGGPGESPGGSSGSESGSGGEPSESGSSGESPGGSSGSESGSGGEPSESGSS

SEQ ID NO: 770 - protein, 902 aa, Artificial Sequence
  Description of Artificial Sequence: Synthetic polypeptide
KCNTATCATQRLANFLVHSSNNFGAILSSTNVGSNTYGGSPAGSPTSTEEGTSESATPESGPGTSTEPSEGSAPGSPAGSPTSTEEGTSTEPSEGSAPGTSTEPSEGSAPGTSESATPESGPGSEPATSGSETPGSEPATSGSETPGSPAGSPTSTEEGTSESATPESGPGTSTEPSEGSAPGTSTEPSEGSAPGSPAGSPTSTEEGTSTEPSEGSAPGTSTEPSEGSAPGTSESATPESGPGTSTEPSEGSAPGTSESATPESGPGSEPATSGSETPGTSTEPSEGSAPGTSTEPSEGSAPGTSESATPESGPGTSESATPESGPGSPAGSPTSTEEGTSESATPESGPGSEPATSGSETPGTSESATPESGPGTSTEPSEGSAPGTSTEPSEGSAPGTSTEPSEGSAPGTSTEPSEGSAPGTSTEPSEGSAPGTSTEPSEGSAPGSPAGSPTSTEEGTSTEPSEGSAPGTSESATPESGPGSEPATSGSETPGTSESATPESGPGSEPATSGSETPGTSESATPESGPGTSTEPSEGSAPGTSESATPESGPGSPAGSPTSTEEGSPAGSPTSTEEGSPAGSPTSTEEGTSESATPESGPGTSTEPSEGSAPGTSESATPESGPGSEPATSGSETPGTSESATPESGPGSEPATSGSETPGTSESATPESGPGTSTEPSEGSAPGSPAGSPTSTEEGTSESATPESGPGSEPATSGSETPGTSESATPESGPGSPAGSPTSTEEGSPAGSPTSTEEGTSTEPSEGSAPGTSESATPESGPGTSESATPESGPGTSESATPESGPGSEPATSGSETPGSEPATSGSETPGSPAGSPTSTEEGTSTEPSEGSAPGTSTEPSEGSAPGSEPATSGSETPGTSESATPESGPGTSTEPSEGSAP

SEQ ID NO: 771 - protein, 913 aa, Artificial Sequence
  Description of Artificial Sequence: Synthetic polypeptide
  MOD_RES (468)..(470): Any amino acid
  MOD_RES (481)..(484): Any amino acid
KCNTATCATQRLANFLVHSSNNFGAILSSTNVGSNTYGGSTSESPSGTAPGTSPSGESSTAPGSTSESPSGTAPGSTSESPSGTAPGTSTPESGSASPGTSTPESGSASPGSTSESPSGTAPGSTSESPSGTAPGTSPSGESSTAPGSTSESPSGTAPGTSPSGESSTAPGTSPSGESSTAPGSTSSTAESPGPGTSPSGESSTAPGTSPSGESSTAPGSTSSTAESPGPGTSTPESGSASPGTSTPESGSASPGSTSESPSGTAPGSTSESPSGTAPGTSTPESGSASPGSTSSTAESPGPGTSTPESGSASPGSTSESPSGTAPGTSPSGESSTAPGSTSSTAESPGPGTSPSGESSTAPGTSTPESGSASPGSTSSTAESPGPGSTSSTAESPGPGSTSSTAESPGPGSTSSTAESPGPGTSPSGESSTAPGSTSESPSGTAPGSTSESPSGTAPGTSTPESGPXXXGASASGAPSTXXXXSESPSGTAPGSTSESPSGTAPGSTSESPSGTAPGSTSESPSGTAPGSTSESPSGTAPGSTSESPSGTAPGTSTPESGSASPGTSPSGESSTAPGTSPSGESSTAPGSTSSTAESPGPGTSPSGESSTAPGTSTPESGSASPGSTSESPSGTAPGSTSESPSGTAPGTSPSGESSTAPGSTSESPSGTAPGTSTPESGSASPGTSTPESGSASPGSTSESPSGTAPGTSTPESGSASPGSTSSTAESPGPGSTSESPSGTAPGSTSESPSGTAPGTSPSGESSTAPGSTSSTAESPGPGTSPSGESSTAPGTSTPESGSASPGTSPSGESSTAPGTSPSGESSTAPGTSPSGESSTAPGSTSSTAESPGPGSTSSTAESPGPGTSPSGESSTAPGSSPSASTGTGPGSSTPSGATGSPGSSTPSGATGSP

SEQ ID NO: 772 - protein, 902 aa, Artificial Sequence
  Description of Artificial Sequence: Synthetic polypeptide
KCNTATCATQRLANFLVHSSNNFGAILSSTNVGSNTYGGASPGTSSTGSPGSSPSASTGTGPGSSPSASTGTGPGTPGSGTASSSPGSSTPSGATGSPGSNPSASTGTGPGASPGTSSTGSPGTPGSGTASSSPGSSTPSGATGSPGTPGSGTASSSPGASPGTSSTGSPGASPGTSSTGSPGTPGSGTASSSPGSSTPSGATGSPGASPGTSSTGSPGTPGSGTASSSPGSSTPSGATGSPGSNPSASTGTGPGSSPSASTGTGPGSSTPSGATGSPGSSTPSGATGSPGASPGTSSTGSPGASPGTSSTGSPGASPGTSSTGSPGTPGSGTASSSPGASPGTSSTGSPGASPGTSSTGSPGASPGTSSTGSPGSSPSASTGTGPGTPGSGTASSSPGASPGTSSTGSPGASPGTSSTGSPGASPGTSSTGSPGSSTPSGATGSPGSSTPSGATGSPGASPGTSSTGSPGTPGSGTASSSPGSSTPSGATGSPGSSTPSGATGSPGSSTPSGATGSPGSSPSASTGTGPGASPGTSSTGSPGASPGTSSTGSPGTPGSGTASSSPGASPGTSSTGSPGASPGTSSTGSPGASPGTSSTGSPGASPGTSSTGSPGTPGSGTASSSPGSSTPSGATGSPGTPGSGTASSSPGSSTPSGATGSPGTPGSGTASSSPGSSTPSGATGSPGSSTPSGATGSPGSSPSASTGTGPGSSPSASTGTGPGASPGTSSTGSPGTPGSGTASSSPGSSTPSGATGSPGSSPSASTGTGPGSSPSASTGTGPGASPGTSSTGSPGASPGTSSTGSPGSSTPSGATGSPGSSPSASTGTGPGASPGTSSTGSPGSSPSASTGTGPGTPGSGTASSSPGSSTPSGATGSPGSSTPSGATGSPGASPGTSSTGSP

SEQ ID NO: 773 - protein, 913 aa, Artificial Sequence
  Description of Artificial Sequence: Synthetic polypeptide
KCNTATCATQRLANFLVHSSNNFGAILSSTNVGSNTYGGTSTEPSEGSAPGSEPATSGSETPGSPAGSPTSTEEGSTSSTAESPGPGTSTPESGSASPGSTSESPSGTAPGSTSESPSGTAPGTSTPESGSASPGTSTPESGSASPGSEPATSGSETPGTSESATPESGPGSPAGSPTSTEEGTSTEPSEGSAPGTSESATPESGPGTSTEPSEGSAPGTSTEPSEGSAPGSPAGSPTSTEEGTSTEPSEGSAPGTSTEPSEGSAPGTSESATPESGPGTSESATPESGPGTSTEPSEGSAPGTSTEPSEGSAPGTSESATPESGPGTSTEPSEGSAPGSEPATSGSETPGSPAGSPTSTEEGSSTPSGATGSPGTPGSGTASSSPGSSTPSGATGSPGTSTEPSEGSAPGTSTEPSEGSAPGSEPATSGSETPGSPAGSPTSTEEGSPAGSPTSTEEGTSTEPSEGSAPGASASGAPSTGGTSESATPESGPGSPAGSPTSTEEGSPAGSPTSTEEGSTSSTAESPGPGSTSESPSGTAPGTSPSGESSTAPGTPGSGTASSSPGSSTPSGATGSPGSSPSASTGTGPGSEPATSGSETPGTSESATPESGPGSEPATSGSETPGSTSSTAESPGPGSTSSTAESPGPGTSPSGESSTAPGSEPATSGSETPGSEPATSGSETPGTSTEPSEGSAPGSTSSTAESPGPGTSTPESGSASPGSTSESPSGTAPGTSTEPSEGSAPGTSTEPSEGSAPGTSTEPSEGSAPGSSTPSGATGSPGSSPSASTGTGPGASPGTSSTGSPGSEPATSGSETPGTSESATPESGPGSPAGSPTSTEEGSSTPSGATGSPGSSPSASTGTGPGASPGTSSTGSPGTSESATPESGPGTSTEPSEGSAPGTSTEPSEGSAP

SEQ ID NO: 774 - protein, 1356 aa, Artificial Sequence
  Description of Artificial Sequence: Synthetic polypeptide
KCNTATCATQRLANFLVHSSNNFGAILSSTNVGSNTYGGTSTEPSEGSAPGSEPATSGSETPGSPAGSPTSTEEGSTSSTAESPGPGTSTPESGSASPGSTSESPSGTAPGSTSESPSGTAPGTSTPESGSASPGTSTPESGSASPGSEPATSGSETPGTSESATPESGPGSPAGSPTSTEEGTSTEPSEGSAPGTSESATPESGPGTSTEPSEGSAPGTSTEPSEGSAPGSPAGSPTSTEEGTSTEPSEGSAPGTSTEPSEGSAPGTSESATPESGPGTSESATPESGPGTSTEPSEGSAPGTSTEPSEGSAPGTSESATPESGPGTSTEPSEGSAPGSEPATSGSETPGSPAGSPTSTEEGSSTPSGATGSPGTPGSGTASSSPGSSTPSGATGSPGTSTEPSEGSAPGTSTEPSEGSAPGSEPATSGSETPGSPAGSPTSTEEGSPAGSPTSTEEGTSTEPSEGSAPGPEPTGPAPSGGSEPATSGSETPGTSESATPESGPGSPAGSPTSTEEGTSESATPESGPGSPAGSPTSTEEGSPAGSPTSTEEGTSESATPESGPGSPAGSPTSTEEGSPAGSPTSTEEGSTSSTAESPGPGSTSESPSGTAPGTSPSGESSTAPGSTSESPSGTAPGSTSESPSGTAPGTSPSGESSTAPGTSTEPSEGSAPGTSESATPESGPGTSESATPESGPGSEPATSGSETPGTSESATPESGPGTSESATPESGPGTSTEPSEGSAPGTSESATPESGPGTSTEPSEGSAPGTSPSGESSTAPGTSPSGESSTAPGTSPSGESSTAPGTSTEPSEGSAPGSPAGSPTSTEEGTSTEPSEGSAPGSSPSASTGTGPGSSTPSGATGSPGSSTPSGATGSPGSSTPSGATGSPGSSTPSGATGSPGASPGTSSTGSPGASASGAPSTGGTSPSGESSTAPGSTSSTAESPGPGTSPSGESSTAPGTSESATPESGPGTSTEPSEGSAPGTSTEPSEGSAPGSSPSASTGTGPGSSTPSGATGSPGASPGTSSTGSPGTSTPESGSASPGTSPSGESSTAPGTSPSGESSTAPGTSESATPESGPGSEPATSGSETPGTSTEPSEGSAPGSTSESPSGTAPGSTSESPSGTAPGTSTPESGSASPGSPAGSPTSTEEGTSESATPESGPGTSTEPSEGSAPGSPAGSPTSTEEGTSESATPESGPGSEPATSGSETPGSSTPSGATGSPGASPGTSSTGSPGSSTPSGATGSPGSTSESPSGTAPGTSPSGESSTAPGSTSSTAESPGPGSSTPSGATGSPGASPGTSSTGSPGTPGSGTASSSPGSPAGSPTSTEEGSPAGSPTSTEEGTSTEPSEGSAP

SEQ ID NO: 775 - protein, 951 aa, Artificial Sequence
  Description of Artificial Sequence: Synthetic polypeptide
MAEPAGSPTSTEEGTPGSGTASSSPGSSTPSGATGSPGASPGTSSTGSPGSPAGSPTSTEEGTSESATPESGPGTSTEPSEGSAPGSPAGSPTSTEEGTSTEPSEGSAPGTSTEPSEGSAPGTSESATPESGPGSEPATSGSETPGSEPATSGSETPGSPAGSPTSTEEGTSESATPESGPGTSTEPSEGSAPGTSTEPSEGSAPGSPAGSPTSTEEGTSTEPSEGSAPGTSTEPSEGSAPGTSESATPESGPGTSTEPSEGSAPGTSESATPESGPGSEPATSGSETPGTSTEPSEGSAPGTSTEPSEGSAPGTSESATPESGPGTSESATPESGPGSPAGSPTSTEEGTSESATPESGPGSEPATSGSETPGTSESATPESGPGTSTEPSEGSAPGTSTEPSEGSAPGTSTEPSEGSAPGTSTEPSEGSAPGTSTEPSEGSAPGTSTEPSEGSAPGSPAGSPTSTEEGTSTEPSEGSAPGTSESATPESGPGSEPATSGSETPGTSESATPESGPGSEPATSGSETPGTSESATPESGPGTSTEPSEGSAPGTSESATPESGPGSPAGSPTSTEEGSPAGSPTSTEEGSPAGSPTSTEEGTSESATPESGPGTSTEPSEGSAPGTSESATPESGPGSEPATSGSETPGTSESATPESGPGSEPATSGSETPGTSESATPESGPGTSTEPSEGSAPGSPAGSPTSTEEGTSESATPESGPGSEPATSGSETPGTSESATPESGPGSPAGSPTSTEEGSPAGSPTSTEEGTSTEPSEGSAPGTSESATPESGPGTSESATPESGPGTSESATPESGPGSEPATSGSETPGSEPATSGSETPGSPAGSPTSTEEGTSTEPSEGSAPGTSTEPSEGSAPGSEPATSGSETPGTSESATPESGPGTSTEPSEGSAPGKCNTATCATQRLANFLVHSSNNFGAILSSTNVGSNTY

SEQ ID NO: 776 - protein, 962 aa, Artificial Sequence
  Description of Artificial Sequence: Synthetic polypeptide
MAEPAGSPTSTEEGASPGTSSTGSPGSSTPSGATGSPGSSTPSGATGSPGTSTEPSEGSAPGSEPATSGSETPGSPAGSPTSTEEGSTSSTAESPGPGTSTPESGSASPGSTSESPSGTAPGSTSESPSGTAPGTSTPESGSASPGTSTPESGSASPGSEPATSGSETPGTSESATPESGPGSPAGSPTSTEEGTSTEPSEGSAPGTSESATPESGPGTSTEPSEGSAPGTSTEPSEGSAPGSPAGSPTSTEEGTSTEPSEGSAPGTSTEPSEGSAPGTSESATPESGPGTSESATPESGPGTSTEPSEGSAPGTSTEPSEGSAPGTSESATPESGPGTSTEPSEGSAPGSEPATSGSETPGSPAGSPTSTEEGSSTPSGATGSPGTPGSGTASSSPGSSTPSGATGSPGTSTEPSEGSAPGTSTEPSEGSAPGSEPATSGSETPGSPAGSPTSTEEGSPAGSPTSTEEGTSTEPSEGSAPGASASGAPSTGGTSESATPESGPGSPAGSPTSTEEGSPAGSPTSTEEGSTSSTAESPGPGSTSESPSGTAPGTSPSGESSTAPGTPGSGTASSSPGSSTPSGATGSPGSSPSASTGTGPGSEPATSGSETPGTSESATPESGPGSEPATSGSETPGSTSSTAESPGPGSTSSTAESPGPGTSPSGESSTAPGSEPATSGSETPGSEPATSGSETPGTSTEPSEGSAPGSTSSTAESPGPGTSTPESGSASPGSTSESPSGTAPGTSTEPSEGSAPGTSTEPSEGSAPGTSTEPSEGSAPGSSTPSGATGSPGSSPSASTGTGPGASPGTSSTGSPGSEPATSGSETPGTSESATPESGPGSPAGSPTSTEEGSSTPSGATGSPGSSPSASTGTGPGASPGTSSTGSPGTSESATPESGPGTSTEPSEGSAPGTSTEPSEGSAPGKCNTATCATQRLANFLVHSSNNFGAILSSTNVGSNTY

SEQ ID NO: 777 - protein, 182 aa, Artificial Sequence
  Description of Artificial Sequence: Synthetic polypeptide
GSEPATSGSETPGTSESATPESGPGSEPATSGSETPGSPAGSPTSTEEGTSTEPSEGSAPGSEPATSGSETPGSEPATSGSETPGSEPATSGSETPGTSTEPSEGSAPGTSESATPESGPGSEPATSGSETPGTSTEPSEGSAPGKCNTATCATQRLANFLVHSSNNFGAILSSTNVGSNTY

SEQ ID NO: 778 - protein, 182 aa, Artificial Sequence
  Description of Artificial Sequence: Synthetic polypeptide
GTSTPESGSASPGTSPSGESSTAPGTSPSGESSTAPGSTSSTAESPGPGSTSESPSGTAPGSTSSTAESPGPGTSPSGESSTAPGTSTPESGSASPGSTSSTAESPGPGTSPSGESSTAPGTSPSGESSTAPGTSPSGESSTAPGKCNTATCATQRLANFLVHSSNNFGAILSSTNVGSNTY

SEQ ID NO: 779 - protein, 326 aa, Artificial Sequence
  Description of Artificial Sequence: Synthetic polypeptide
GTSESATPESGPGSEPATSGSETPGTSESATPESGPGSEPATSGSETPGTSESATPESGPGTSTEPSEGSAPGSPAGSPTSTEEGTSESATPESGPGSEPATSGSETPGTSESATPESGPGSPAGSPTSTEEGSPAGSPTSTEEGTSTEPSEGSAPGTSESATPESGPGTSESATPESGPGTSESATPESGPGSEPATSGSETPGSEPATSGSETPGSPAGSPTSTEEGTSTEPSEGSAPGTSTEPSEGSAPGSEPATSGSETPGTSESATPESGPGTSTEPSEGSAPGKCNTATCATQRLANFLVHSSNNFGAILSSTNVGSNTY

SEQ ID NO: 780 - protein, 614 aa, Artificial Sequence
  Description of Artificial Sequence: Synthetic polypeptide
GSPAGSPTSTEEGTSESATPESGPGTSTEPSEGSAPGSPAGSPTSTEEGTSTEPSEGSAPGTSTEPSEGSAPGTSESATPESGPGSEPATSGSETPGSEPATSGSETPGSPAGSPTSTEEGTSESATPESGPGTSTEPSEGSAPGTSTEPSEGSAPGSPAGSPTSTEEGTSTEPSEGSAPGTSTEPSEGSAPGTSESATPESGPGTSTEPSEGSAPGTSESATPESGPGSEPATSGSETPGTSTEPSEGSAPGTSTEPSEGSAPGTSESATPESGPGTSESATPESGPGSPAGSPTSTEEGTSESATPESGPGSEPATSGSETPGTSESATPESGPGTSTEPSEGSAPGTSTEPSEGSAPGTSTEPSEGSAPGTSTEPSEGSAPGTSTEPSEGSAPGTSTEPSEGSAPGSPAGSPTSTEEGTSTEPSEGSAPGTSESATPESGPGSEPATSGSETPGTSESATPESGPGSEPATSGSETPGTSESATPESGPGTSTEPSEGSAPGTSESATPESGPGSPAGSPTSTEEGSPAGSPTSTEEGSPAGSPTSTEEGTSESATPESGPGTSTEPSEGSAPGKCNTATCATQRLANFLVHSSNNFGAILSSTNVGSNTY

SEQ ID NO: 781 - protein, 614 aa, Artificial Sequence
  Description of Artificial Sequence: Synthetic polypeptide
GSTSSTAESPGPGSTSSTAESPGPGSTSESPSGTAPGSTSSTAESPGPGSTSSTAESPGPGTSTPESGSASPGSTSESPSGTAPGTSPSGESSTAPGSTSESPSGTAPGSTSESPSGTAPGTSPSGESSTAPGSTSESPSGTAPGSTSESPSGTAPGTSPSGESSTAPGSTSESPSGTAPGSTSESPSGTAPGSTSESPSGTAPGTSTPESGSASPGSTSESPSGTAPGTSTPESGSASPGSTSSTAESPGPGSTSSTAESPGPGTSTPESGSASPGTSTPESGSASPGSTSESPSGTAPGTSTPESGSASPGTSTPESGSASPGSTSESPSGTAPGSTSESPSGTAPGSTSESPSGTAPGSTSSTAESPGPGTSTPESGSASPGTSTPESGSASPGSTSESPSGTAPGSTSESPSGTAPGTSTPESGSASPGSTSESPSGTAPGSTSESPSGTAPGTSTPESGSASPGTSPSGESSTAPGSTSSTAESPGPGTSPSGESSTAPGSTSSTAESPGPGTSTPESGSASPGSTSESPSGTAPGSTSSTAESPGPGTSTPESGSASPGTSTPESGSASPGKCNTATCATQRLANFLVHSSNNFGAILSSTNVGSNTY

SEQ ID NO: 782 - protein, 874 aa, Artificial Sequence
  Description of Artificial Sequence: Synthetic polypeptide
GSSESGSSEGGPGSSESGSSEGGPGESPGGSSGSESGSGGEPSESGSSGESPGGSSGSESGESPGGSSGSESGSSESGSSEGGPGSSESGSSEGGPGSSESGSSEGGPGESPGGSSGSESGESPGGSSGSESGESPGGSSGSESGSSESGSSEGGPGSSESGSSEGGPGSSESGSSEGGPGSSESGSSEGGPGSSESGSSEGGPGSSESGSSEGGPGSGGEPSESGSSGESPGGSSGSESGESPGGSSGSESGSGGEPSESGSSGSEGSSGPGESSGSSESGSSEGGPGSGGEPSESGSSGSEGSSGPGESSGSSESGSSEGGPGSGGEPSESGSSGESPGGSSGSESGSGGEPSESGSSGSGGEPSESGSSGSSESGSSEGGPGSGGEPSESGSSGSGGEPSESGSSGSEGSSGPGESSGESPGGSSGSESGSEGSSGPGESSGSEGSSGPGESSGSGGEPSESGSSGSSESGSSEGGPGSSESGSSEGGPGESPGGSSGSESGSGGEPSESGSSGSEGSSGPGESSGESPGGSSGSESGSEGSSGPGSSESGSSEGGPGSGGEPSESGSSGSEGSSGPGESSGSEGSSGPGESSGSEGSSGPGESSGSGGEPSESGSSGSGGEPSESGSSGESPGGSSGSESGESPGGSSGSESGSGGEPSESGSSGSEGSSGPGESSGESPGGSSGSESGSSESGSSEGGPGSSESGSSEGGPGSSESGSSEGGPGSGGEPSESGSSGSSESGSSEGGPGESPGGSSGSESGSGGEPSESGSSGSSESGSSEGGPGESPGGSSGSESGSGGEPSESGSSGESPGGSSGSESGSGGEPSESGSSGKCNTATCATQRLANFLVHSSNNFGAILSSTNVGSNTY

SEQ ID NO: 783 - protein, 902 aa, Artificial Sequence
  Description of Artificial Sequence: Synthetic polypeptide
GSPAGSPTSTEEGTSESATPESGPGTSTEPSEGSAPGSPAGSPTSTEEGTSTEPSEGSAPGTSTEPSEGSAPGTSESATPESGPGSEPATSGSETPGSEPATSGSETPGSPAGSPTSTEEGTSESATPESGPGTSTEPSEGSAPGTSTEPSEGSAPGSPAGSPTSTEEGTSTEPSEGSAPGTSTEPSEGSAPGTSESATPESGPGTSTEPSEGSAPGTSESATPESGPGSEPATSGSETPGTSTEPSEGSAPGTSTEPSEGSAPGTSESATPESGPGTSESATPESGPGSPAGSPTSTEEGTSESATPESGPGSEPATSGSETPGTSESATPESGPGTSTEPSEGSAPGTSTEPSEGSAPGTSTEPSEGSAPGTSTEPSEGSAPGTSTEPSEGSAPGTSTEPSEGSAPGSPAGSPTSTEEGTSTEPSEGSAPGTSESATPESGPGSEPATSGSETPGTSESATPESGPGSEPATSGSETPGTSESATPESGPGTSTEPSEGSAPGTSESATPESGPGSPAGSPTSTEEGSPAGSPTSTEEGSPAGSPTSTEEGTSESATPESGPGTSTEPSEGSAPGTSESATPESGPGSEPATSGSETPGTSESATPESGPGSEPATSGSETPGTSESATPESGPGTSTEPSEGSAPGSPAGSPTSTEEGTSESATPESGPGSEPATSGSETPGTSESATPESGPGSPAGSPTSTEEGSPAGSPTSTEEGTSTEPSEGSAPGTSESATPESGPGTSESATPESGPGTSESATPESGPGSEPATSGSETPGSEPATSGSETPGSPAGSPTSTEEGTSTEPSEGSAPGTSTEPSEGSAPGSEPATSGSETPGTSESATPESGPGTSTEPSEGSAPGKCNTATCATQRLANFLVHSSNNFGAILSSTNVGSNTY

SEQ ID NO: 784 - protein, 913 aa, Artificial Sequence
  Description of Artificial Sequence: Synthetic polypeptide
  MOD_RES (430)..(432): Any amino acid
  MOD_RES (443)..(446): Any amino acid
GSTSESPSGTAPGTSPSGESSTAPGSTSESPSGTAPGSTSESPSGTAPGTSTPESGSASPGTSTPESGSASPGSTSESPSGTAPGSTSESPSGTAPGTSPSGESSTAPGSTSESPSGTAPGTSPSGESSTAPGTSPSGESSTAPGSTSSTAESPGPGTSPSGESSTAPGTSPSGESSTAPGSTSSTAESPGPGTSTPESGSASPGTSTPESGSASPGSTSESPSGTAPGSTSESPSGTAPGTSTPESGSASPGSTSSTAESPGPGTSTPESGSASPGSTSESPSGTAPGTSPSGESSTAPGSTSSTAESPGPGTSPSGESSTAPGTSTPESGSASPGSTSSTAESPGPGSTSSTAESPGPGSTSSTAESPGPGSTSSTAESPGPGTSPSGESSTAPGSTSESPSGTAPGSTSESPSGTAPGTSTPESGPXXXGASASGAPSTXXXXSESPSGTAPGSTSESPSGTAPGSTSESPSGTAPGSTSESPSGTAPGSTSESPSGTAPGSTSESPSGTAPGTSTPESGSASPGTSPSGESSTAPGTSPSGESSTAPGSTSSTAESPGPGTSPSGESSTAPGTSTPESGSASPGSTSESPSGTAPGSTSESPSGTAPGTSPSGESSTAPGSTSESPSGTAPGTSTPESGSASPGTSTPESGSASPGSTSESPSGTAPGTSTPESGSASPGSTSSTAESPGPGSTSESPSGTAPGSTSESPSGTAPGTSPSGESSTAPGSTSSTAESPGPGTSPSGESSTAPGTSTPESGSASPGTSPSGESSTAPGTSPSGESSTAPGTSPSGESSTAPGSTSSTAESPGPGSTSSTAESPGPGTSPSGESSTAPGSSPSASTGTGPGSSTPSGATGSPGSSTPSGATGSPGKCNTATCATQRLANFLVHSSNNFGAILSSTNVGSNTY

SEQ ID NO: 785 - protein, 902 aa, Artificial Sequence
  Description of Artificial Sequence: Synthetic polypeptide
GASPGTSSTGSPGSSPSASTGTGPGSSPSASTGTGPGTPGSGTASSSPGSSTPSGATGSPGSNPSASTGTGPGASPGTSSTGSPGTPGSGTASSSPGSSTPSGATGSPGTPGSGTASSSPGASPGTSSTGSPGASPGTSSTGSPGTPGSGTASSSPGSSTPSGATGSPGASPGTSSTGSPGTPGSGTASSSPGSSTPSGATGSPGSNPSASTGTGPGSSPSASTGTGPGSSTPSGATGSPGSSTPSGATGSPGASPGTSSTGSPGASPGTSSTGSPGASPGTSSTGSPGTPGSGTASSSPGASPGTSSTGSPGASPGTSSTGSPGASPGTSSTGSPGSSPSASTGTGPGTPGSGTASSSPGASPGTSSTGSPGASPGTSSTGSPGASPGTSSTGSPGSSTPSGATGSPGSSTPSGATGSPGASPGTSSTGSPGTPGSGTASSSPGSSTPSGATGSPGSSTPSGATGSPGSSTPSGATGSPGSSPSASTGTGPGASPGTSSTGSPGASPGTSSTGSPGTPGSGTASSSPGASPGTSSTGSPGASPGTSSTGSPGASPGTSSTGSPGASPGTSSTGSPGTPGSGTASSSPGSSTPSGATGSPGTPGSGTASSSPGSSTPSGATGSPGTPGSGTASSSPGSSTPSGATGSPGSSTPSGATGSPGSSPSASTGTGPGSSPSASTGTGPGASPGTSSTGSPGTPGSGTASSSPGSSTPSGATGSPGSSPSASTGTGPGSSPSASTGTGPGASPGTSSTGSPGASPGTSSTGSPGSSTPSGATGSPGSSPSASTGTGPGASPGTSSTGSPGSSPSASTGTGPGTPGSGTASSSPGSSTPSGATGSPGSSTPSGATGSPGASPGTSSTGSPGKCNTATCATQRLANFLVHSSNNFGAILSSTNVGSNTY

SEQ ID NO: 786 - protein, 913 aa, Artificial Sequence
  Description of Artificial Sequence: Synthetic polypeptide
GTSTEPSEGSAPGSEPATSGSETPGSPAGSPTSTEEGSTSSTAESPGPGTSTPESGSASPGSTSESPSGTAPGSTSESPSGTAPGTSTPESGSASPGTSTPESGSASPGSEPATSGSETPGTSESATPESGPGSPAGSPTSTEEGTSTEPSEGSAPGTSESATPESGPGTSTEPSEGSAPGTSTEPSEGSAPGSPAGSPTSTEEGTSTEPSEGSAPGTSTEPSEGSAPGTSESATPESGPGTSESATPESGPGTSTEPSEGSAPGTSTEPSEGSAPGTSESATPESGPGTSTEPSEGSAPGSEPATSGSETPGSPAGSPTSTEEGSSTPSGATGSPGTPGSGTASSSPGSSTPSGATGSPGTSTEPSEGSAPGTSTEPSEGSAPGSEPATSGSETPGSPAGSPTSTEEGSPAGSPTSTEEGTSTEPSEGSAPGASASGAPSTGGTSESATPESGPGSPAGSPTSTEEGSPAGSPTSTEEGSTSSTAESPGPGSTSESPSGTAPGTSPSGESSTAPGTPGSGTASSSPGSSTPSGATGSPGSSPSASTGTGPGSEPATSGSETPGTSESATPESGPGSEPATSGSETPGSTSSTAESPGPGSTSSTAESPGPGTSPSGESSTAPGSEPATSGSETPGSEPATSGSETPGTSTEPSEGSAPGSTSSTAESPGPGTSTPESGSASPGSTSESPSGTAPGTSTEPSEGSAPGTSTEPSEGSAPGTSTEPSEGSAPGSSTPSGATGSPGSSPSASTGTGPGASPGTSSTGSPGSEPATSGSETPGTSESATPESGPGSPAGSPTSTEEGSSTPSGATGSPGSSPSASTGTGPGASPGTSSTGSPGTSESATPESGPGTSTEPSEGSAPGTSTEPSEGSAPGKCNTATCATQRLANFLVHSSNNFGAILSSTNVGSNTY

SEQ ID NO: 787 - protein, 1356 aa, Artificial Sequence
  Description of Artificial Sequence: Synthetic polypeptide
GTSTEPSEGSAPGSEPATSGSETPGSPAGSPTSTEEGSTSSTAESPGPGTSTPESGSASPGSTSESPSGTAPGSTSESPSGTAPGTSTPESGSASPGTSTPESGSASPGSEPATSGSETPGTSESATPESGPGSPAGSPTSTEEGTSTEPSEGSAPGTSESATPESGPGTSTEPSEGSAPGTSTEPSEGSAPGSPAGSPTSTEEGTSTEPSEGSAPGTSTEPSEGSAPGTSESATPESGPGTSESATPESGPGTSTEPSEGSAPGTSTEPSEGSAPGTSESATPESGPGTSTEPSEGSAPGSEPATSGSETPGSPAGSPTSTEEGSSTPSGATGSPGTPGSGTASSSPGSSTPSGATGSPGTSTEPSEGSAPGTSTEPSEGSAPGSEPATSGSETPGSPAGSPTSTEEGSPAGSPTSTEEGTSTEPSEGSAPGPEPTGPAPSGGSEPATSGSETPGTSESATPESGPGSPAGSPTSTEEGTSESATPESGPGSPAGSPTSTEEGSPAGSPTSTEEGTSESATPESGPGSPAGSPTSTEEGSPAGSPTSTEEGSTSSTAESPGPGSTSESPSGTAPGTSPSGESSTAPGSTSESPSGTAPGSTSESPSGTAPGTSPSGESSTAPGTSTEPSEGSAPGTSESATPESGPGTSESATPESGPGSEPATSGSETPGTSESATPESGPGTSESATPESGPGTSTEPSEGSAPGTSESATPESGPGTSTEPSEGSAPGTSPSGESSTAPGTSPSGESSTAPGTSPSGESSTAPGTSTEPSEGSAPGSPAGSPTSTEEGTSTEPSEGSAPGSSPSASTGTGPGSSTPSGATGSPGSSTPSGATGSPGSSTPSGATGSPGSSTPSGATGSPGASPGTSSTGSPGASASGAPSTGGTSPSGESSTAPGSTSSTAESPGPGTSPSGESSTAPGTSESATPESGPGTSTEPSEGSAPGTSTEPSEGSAPGSSPSASTGTGPGSSTPSGATGSPGASPGTSSTGSPGTSTPESGSASPGTSPSGESSTAPGTSPSGESSTAPGTSESATPESGPGSEPATSGSETPGTSTEPSEGSAPGSTSESPSGTAPGSTSESPSGTAPGTSTPESGSASPGSPAGSPTSTEEGTSESATPESGPGTSTEPSEGSAPGSPAGSPTSTEEGTSESATPESGPGSEPATSGSETPGSSTPSGATGSPGASPGTSSTGSPGSSTPSGATGSPGSTSESPSGTAPGTSPSGESSTAPGSTSSTAESPGPGSSTPSGATGSPGASPGTSSTGSPGTPGSGTASSSPGSPAGSPTSTEEGSPAGSPTSTEEGTSTEPSEGSAPGKCNTATCATQRLANFLVHSSNNFGAILSSTNVGSNTY

SEQ ID NO: 788 - protein, 298 aa, Artificial Sequence
  Description of Artificial Sequence: Synthetic polypeptide
MRPSGRKSSKMQAFRIWDVNQKTFYLRNNQLVAGYLQGPNVNLEEKIDVVPIEPHALFLGIHGGKMCLSCVKSGDETRLQLEAVNITDLSENRKQDKRFAFIRSDSGPTTSFESAACPGWFLCTAMEADQPVSLTNMPDEGVMVTKFYFQEDEGGSEPATSGSETPGTSESATPESGPGSEPATSGSETPGSPAGSPTSTEEGTSTEPSEGSAPGSEPATSGSETPGSEPATSGSETPGSEPATSGSETPGTSTEPSEGSAPGTSESATPESGPGSEPATSGSETPGTSTEPSEGSAP

SEQ ID NO: 789 - protein, 298 aa, Artificial Sequence
  Description of Artificial Sequence: Synthetic polypeptide
MRPSGRKSSKMQAFRIWDVNQKTFYLRNNQLVAGYLQGPNVNLEEKIDVVPIEPHALFLGIHGGKMCLSCVKSGDETRLQLEAVNITDLSENRKQDKRFAFIRSDSGPTTSFESAACPGWFLCTAMEADQPVSLTNMPDEGVMVTKFYFQEDEGGTSTPESGSASPGTSPSGESSTAPGTSPSGESSTAPGSTSSTAESPGPGSTSESPSGTAPGSTSSTAESPGPGTSPSGESSTAPGTSTPESGSASPGSTSSTAESPGPGTSPSGESSTAPGTSPSGESSTAPGTSPSGESSTAP

SEQ ID NO: 790 - protein, 442 aa, Artificial Sequence
  Description of Artificial Sequence: Synthetic polypeptide
MRPSGRKSSKMQAFRIWDVNQKTFYLRNNQLVAGYLQGPNVNLEEKIDVVPIEPHALFLGIHGGKMCLSCVKSGDETRLQLEAVNITDLSENRKQDKRFAFIRSDSGPTTSFESAACPGWFLCTAMEADQPVSLTNMPDEGVMVTKFYFQEDEGGTSESATPESGPGSEPATSGSETPGTSESATPESGPGSEPATSGSETPGTSESATPESGPGTSTEPSEGSAPGSPAGSPTSTEEGTSESATPESGPGSEPATSGSETPGTSESATPESGPGSPAGSPTSTEEGSPAGSPTSTEEGTSTEPSEGSAPGTSESATPESGPGTSESATPESGPGTSESATPESGPGSEPATSGSETPGSEPATSGSETPGSPAGSPTSTEEGTSTEPSEGSAPGTSTEPSEGSAPGSEPATSGSETPGTSESATPESGPGTSTEPSEGSAP

SEQ ID NO: 791 - protein, 730 aa, Artificial Sequence
  Description of Artificial Sequence: Synthetic polypeptide
MRPSGRKSSKMQAFRIWDVNQKTFYLRNNQLVAGYLQGPNVNLEEKIDVVPIEPHALFLGIHGGKMCLSCVKSGDETRLQLEAVNITDLSENRKQDKRFAFIRSDSGPTTSFESAACPGWFLCTAMEADQPVSLTNMPDEGVMVTKFYFQEDEGGSPAGSPTSTEEGTSESATPESGPGTSTEPSEGSAPGSPAGSPTSTEEGTSTEPSEGSAPGTSTEPSEGSAPGTSESATPESGPGSEPATSGSETPGSEPATSGSETPGSPAGSPTSTEEGTSESATPESGPGTSTEPSEGSAPGTSTEPSEGSAPGSPAGSPTSTEEGTSTEPSEGSAPGTSTEPSEGSAPGTSESATPESGPGTSTEPSEGSAPGTSESATPESGPGSEPATSGSETPGTSTEPSEGSAPGTSTEPSEGSAPGTSESATPESGPGTSESATPESGPGSPAGSPTSTEEGTSESATPESGPGSEPATSGSETPGTSESATPESGPGTSTEPSEGSAPGTSTEPSEGSAPGTSTEPSEGSAPGTSTEPSEGSAPGTSTEPSEGSAPGTSTEPSEGSAPGSPAGSPTSTEEGTSTEPSEGSAPGTSESATPESGPGSEPATSGSETPGTSESATPESGPGSEPATSGSETPGTSESATPESGPGTSTEPSEGSAPGTSESATPESGPGSPAGSPTSTEEGSPAGSPTSTEEGSPAGSPTSTEEGTSESATPESGPGTSTEPSEGSAP

SEQ ID NO: 792 - protein, 730 aa, Artificial Sequence
  Description of Artificial Sequence: Synthetic polypeptide
MRPSGRKSSKMQAFRIWDVNQKTFYLRNNQLVAGYLQGPNVNLEEKIDVVPIEPHALFLGIHGGKMCLSCVKSGDETRLQLEAVNITDLSENRKQDKRFAFIRSDSGPTTSFESAACPGWFLCTAMEADQPVSLTNMPDEGVMVTKFYFQEDEGGSTSSTAESPGPGSTSSTAESPGPGSTSESPSGTAPGSTSSTAESPGPGSTSSTAESPGPGTSTPESGSASPGSTSESPSGTAPGTSPSGESSTAPGSTSESPSGTAPGSTSESPSGTAPGTSPSGESSTAPGSTSESPSGTAPGSTSESPSGTAPGTSPSGESSTAPGSTSESPSGTAPGSTSESPSGTAPGSTSESPSGTAPGTSTPESGSASPGSTSESPSGTAPGTSTPESGSASPGSTSSTAESPGPGSTSSTAESPGPGTSTPESGSASPGTSTPESGSASPGSTSESPSGTAPGTSTPESGSASPGTSTPESGSASPGSTSESPSGTAPGSTSESPSGTAPGSTSESPSGTAPGSTSSTAESPGPGTSTPESGSASPGTSTPESGSASPGSTSESPSGTAPGSTSESPSGTAPGTSTPESGSASPGSTSESPSGTAPGSTSESPSGTAPGTSTPESGSASPGTSPSGESSTAPGSTSSTAESPGPGTSPSGESSTAPGSTSSTAESPGPGTSTPESGSASPGSTSESPSGTAPGSTSSTAESPGPGTSTPESGSASPGTSTPESGSASP

SEQ ID NO: 793 - protein, 990 aa, Artificial Sequence
  Description of Artificial Sequence: Synthetic polypeptide
MRPSGRKSSKMQAFRIWDVNQKTFYLRNNQLVAGYLQGPNVNLEEKIDVVPIEPHALFLGIHGGKMCLSCVKSGDETRLQLEAVNITDLSENRKQDKRFAFIRSDSGPTTSFESAACPGWFLCTAMEADQPVSLTNMPDEGVMVTKFYFQEDEGGSSESGSSEGGPGSSESGSSEGGPGESPGGSSGSESGSGGEPSESGSSGESPGGSSGSESGESPGGSSGSESGSSESGSSEGGPGSSESGSSEGGPGSSESGSSEGGPGESPGGSSGSESGESPGGSSGSESGESPGGSSGSESGSSESGSSEGGPGSSESGSSEGGPGSSESGSSEGGPGSSESGSSEGGPGSSESGSSEGGPGSSESGSSEGGPGSGGEPSESGSSGESPGGSSGSESGESPGGSSGSESGSGGEPSESGSSGSEGSSGPGESSGSSESGSSEGGPGSGGEPSESGSSGSEGSSGPGESSGSSESGSSEGGPGSGGEPSESGSSGESPGGSSGSESGSGGEPSESGSSGSGGEPSESGSSGSSESGSSEGGPGSGGEPSESGSSGSGGEPSESGSSGSEGSSGPGESSGESPGGSSGSESGSEGSSGPGESSGSEGSSGPGESSGSGGEPSESGSSGSSESGSSEGGPGSSESGSSEGGPGESPGGSSGSESGSGGEPSESGSSGSEGSSGPGESSGESPGGSSGSESGSEGSSGPGSSESGSSEGGPGSGGEPSESGSSGSEGSSGPGESSGSEGSSGPGESSGSEGSSGPGESSGSGGEPSESGSSGSGGEPSESGSSGESPGGSSGSESGESPGGSSGSESGSGGEPSESGSSGSEGSSGPGESSGESPGGSSGSESGSSESGSSEGGPGSSESGSSEGGPGSSESGSSEGGPGSGGEPSESGSSGSSESGSSEGGPGESPGGSSGSESGSGGEPSESGSSGSSESGSSEGGPGESPGGSSGSESGSGGEPSESGSSGESPGGSSGSESGSGGEPSESGSS

SEQ ID NO: 794 - protein, 1018 aa, Artificial Sequence
  Description of Artificial Sequence: Synthetic polypeptide
MRPSGRKSSKMQAFRIWDVNQKTFYLRNNQLVAGYLQGPNVNLEEKIDVVPIEPHALFLGIHGGKMCLSCVKSGDETRLQLEAVNITDLSENRKQDKRFAFIRSDSGPTTSFESAACPGWFLCTAMEADQPVSLTNMPDEGVMVTKFYFQEDEGGSPAGSPTSTEEGTSESATPESGPGTSTEPSEGSAPGSPAGSPTSTEEGTSTEPSEGSAPGTSTEPSEGSAPGTSESATPESGPGSEPATSGSETPGSEPATSGSETPGSPAGSPTSTEEGTSESATPESGPGTSTEPSEGSAPGTSTEPSEGSAPGSPAGSPTSTEEGTSTEPSEGSAPGTSTEPSEGSAPGTSESATPESGPGTSTEPSEGSAPGTSESATPESGPGSEPATSGSETPGTSTEPSEGSAPGTSTEPSEGSAPGTSESATPESGPGTSESATPESGPGSPAGSPTSTEEGTSESATPESGPGSEPATSGSETPGTSESATPESGPGTSTEPSEGSAPGTSTEPSEGSAPGTSTEPSEGSAPGTSTEPSEGSAPGTSTEPSEGSAPGTSTEPSEGSAPGSPAGSPTSTEEGTSTEPSEGSAPGTSESATPESGPGSEPATSGSETPGTSESATPESGPGSEPATSGSETPGTSESATPESGPGTSTEPSEGSAPGTSESATPESGPGSPAGSPTSTEEGSPAGSPTSTEEGSPAGSPTSTEEGTSESATPESGPGTSTEPSEGSAPGTSESATPESGPGSEPATSGSETPGTSESATPESGPGSEPATSGSETPGTSESATPESGPGTSTEPSEGSAPGSPAGSPTSTEEGTSESATPESGPGSEPATSGSETPGTSESATPESGPGSPAGSPTSTEEGSPAGSPTSTEEGTSTEPSEGSAPGTSESATPESGPGTSESATPESGPGTSESATPESGPGSEPATSGSETPGSEPATSGSETPGSPAGSPTSTEEGTSTEPSEGSAPGTSTEPSEGSAPGSEPATSGSETPGTSESATPESGPGTSTEPSEGSAP

SEQ ID NO: 795 - protein, 1029 aa, Artificial Sequence
  Description of Artificial Sequence: Synthetic polypeptide
  MOD_RES (584)..(586): Any amino acid
  MOD_RES (597)..(600): Any amino acid
MRPSGRKSSKMQAFRIWDVNQKTFYLRNNQLVAGYLQGPNVNLEEKIDVVPIEPHALFLGIHGGKMCLSCVKSGDETRLQLEAVNITDLSENRKQDKRFAFIRSDSGPTTSFESAACPGWFLCTAMEADQPVSLTNMPDEGVMVTKFYFQEDEGGSTSESPSGTAPGTSPSGESSTAPGSTSESPSGTAPGSTSESPSGTAPGTSTPESGSASPGTSTPESGSASPGSTSESPSGTAPGSTSESPSGTAPGTSPSGESSTAPGSTSESPSGTAPGTSPSGESSTAPGTSPSGESSTAPGSTSSTAESPGPGTSPSGESSTAPGTSPSGESSTAPGSTSSTAESPGPGTSTPESGSASPGTSTPESGSASPGSTSESPSGTAPGSTSESPSGTAPGTSTPESGSASPGSTSSTAESPGPGTSTPESGSASPGSTSESPSGTAPGTSPSGESSTAPGSTSSTAESPGPGTSPSGESSTAPGTSTPESGSASPGSTSSTAESPGPGSTSSTAESPGPGSTSSTAESPGPGSTSSTAESPGPGTSPSGESSTAPGSTSESPSGTAPGSTSESPSGTAPGTSTPESGPXXXGASASGAPSTXXXXSESPSGTAPGSTSESPSGTAPGSTSESPSGTAPGSTSESPSGTAPGSTSESPSGTAPGSTSESPSGTAPGTSTPESGSASPGTSPSGESSTAPGTSPSGESSTAPGSTSSTAESPGPGTSPSGESSTAPGTSTPESGSASPGSTSESPSGTAPGSTSESPSGTAPGTSPSGESSTAPGSTSESPSGTAPGTSTPESGSASPGTSTPESGSASPGSTSESPSGTAPGTSTPESGSASPGSTSSTAESPGPGSTSESPSGTAPGSTSESPSGTAPGTSPSGESSTAPGSTSSTAESPGPGTSPSGESSTAPGTSTPESGSASPGTSPSGESSTAPGTSPSGESSTAPGTSPSGESSTAPGSTSSTAESPGPGSTSSTAESPGPGTSPSGESSTAPGSSPSASTGTGPGSSTPSGATGSPGSSTPSGATGSP

SEQ ID NO: 796 - protein, 1018 aa, Artificial Sequence
  Description of Artificial Sequence: Synthetic polypeptide
MRPSGRKSSKMQAFRIWDVNQKTFYLRNNQLVAGYLQGPNVNLEEKIDVVPIEPHALFLGIHGGKMCLSCVKSGDETRLQLEAVNITDLSENRKQDKRFAFIRSDSGPTTSFESAACPGWFLCTAMEADQPVSLTNMPDEGVMVTKFYFQEDEGGASPGTSSTGSPGSSPSASTGTGPGSSPSASTGTGPGTPGSGTASSSPGSSTPSGATGSPGSNPSASTGTGPGASPGTSSTGSPGTPGSGTASSSPGSSTPSGATGSPGTPGSGTASSSPGASPGTSSTGSPGASPGTSSTGSPGTPGSGTASSSPGSSTPSGATGSPGASPGTSSTGSPGTPGSGTASSSPGSSTPSGATGSPGSNPSASTGTGPGSSPSASTGTGPGSSTPSGATGSPGSSTPSGATGSPGASPGTSSTGSPGASPGTSSTGSPGASPGTSSTGSPGTPGSGTASSSPGASPGTSSTGSPGASPGTSSTGSPGASPGTSSTGSPGSSPSASTGTGPGTPGSGTASSSPGASPGTSSTGSPGASPGTSSTGSPGASPGTSSTGSPGSSTPSGATGSPGSSTPSGATGSPGASPGTSSTGSPGTPGSGTASSSPGSSTPSGATGSPGSSTPSGATGSPGSSTPSGATGSPGSSPSASTGTGPGASPGTSSTGSPGASPGTSSTGSPGTPGSGTASSSPGASPGTSSTGSPGASPGTSSTGSPGASPGTSSTGSPGASPGTSSTGSPGTPGSGTASSSPGSSTPSGATGSPGTPGSGTASSSPGSSTPSGATGSPGTPGSGTASSSPGSSTPSGATGSPGSSTPSGATGSPGSSPSASTGTGPGSSPSASTGTGPGASPGTSSTGSPGTPGSGTASSSPGSSTPSGATGSPGSSPSASTGTGPGSSPSASTGTGPGASPGTSSTGSPGASPGTSSTGSPGSSTPSGATGSPGSSPSASTGTGPGASPGTSSTGSPGSSPSASTGTGPGTPGSGTASSSPGSSTPSGATGSPGSSTPSGATGSPGASPGTSSTGSP

SEQ ID NO: 797 - protein, 1029 aa, Artificial Sequence
  Description of Artificial Sequence: Synthetic polypeptide
MRPSGRKSSKMQAFRIWDVNQKTFYLRNNQLVAGYLQGPNVNLEEKIDVVPIEPHALFLGIHGGKMCLSCVKSGDETRLQLEAVNITDLSENRKQDKRFAFIRSDSGPTTSFESAACPGWFLCTAMEADQPVSLTNMPDEGVMVTKFYFQEDEGGTSTEPSEGSAPGSEPATSGSETPGSPAGSPTSTEEGSTSSTAESPGPGTSTPESGSASPGSTSESPSGTAPGSTSESPSGTAPGTSTPESGSASPGTSTPESGSASPGSEPATSGSETPGTSESATPESGPGSPAGSPTSTEEGTSTEPSEGSAPGTSESATPESGPGTSTEPSEGSAPGTSTEPSEGSAPGSPAGSPTSTEEGTSTEPSEGSAPGTSTEPSEGSAPGTSESATPESGPGTSESATPESGPGTSTEPSEGSAPGTSTEPSEGSAPGTSESATPESGPGTSTEPSEGSAPGSEPATSGSETPGSPAGSPTSTEEGSSTPSGATGSPGTPGSGTASSSPGSSTPSGATGSPGTSTEPSEGSAPGTSTEPSEGSAPGSEPATSGSETPGSPAGSPTSTEEGSPAGSPTSTEEGTSTEPSEGSAPGASASGAPSTGGTSESATPESGPGSPAGSPTSTEEGSPAGSPTSTEEGSTSSTAESPGPGSTSESPSGTAPGTSPSGESSTAPGTPGSGTASSSPGSSTPSGATGSPGSSPSASTGTGPGSEPATSGSETPGTSESATPESGPGSEPATSGSETPGSTSSTAESPGPGSTSSTAESPGPGTSPSGESSTAPGSEPATSGSETPGSEPATSGSETPGTSTEPSEGSAPGSTSSTAESPGPGTSTPESGSASPGSTSESPSGTAPGTSTEPSEGSAPGTSTEPSEGSAPGTSTEPSEGSAPGSSTPSGATGSPGSSPSASTGTGPGASPGTSSTGSPGSEPATSGSETPGTSESATPESGPGSPAGSPTSTEEGSSTPSGATGSPGSSPSASTGTGPGASPGTSSTGSPGTSESATPESGPGTSTEPSEGSAPGTSTEPSEGSAP

SEQ ID NO: 798 - protein, 1472 aa, Artificial Sequence
  Description of Artificial Sequence: Synthetic polypeptide
MRPSGRKSSKMQAFRIWDVNQKTFYLRNNQLVAGYLQGPNVNLEEKIDVVPIEPHALFLGIHGGKMCLSCVKSGDETRLQLEAVNITDLSENRKQDKRFAFIRSDSGPTTSFESAACPGWFLCTAMEADQPVSLTNMPDEGVMVTKFYFQEDEGGTSTEPSEGSAPGSEPATSGSETPGSPAGSPTSTEEGSTSSTAESPGPGTSTPESGSASPGSTSESPSGTAPGSTSESPSGTAPGTSTPESGSASPGTSTPESGSASPGSEPATSGSETPGTSESATPESGPGSPAGSPTSTEEGTSTEPSEGSAPGTSESATPESGPGTSTEPSEGSAPGTSTEPSEGSAPGSPAGSPTSTEEGTSTEPSEGSAPGTSTEPSEGSAPGTSESATPESGPGTSESATPESGPGTSTEPSEGSAPGTSTEPSEGSAPGTSESATPESGPGTSTEPSEGSAPGSEPATSGSETPGSPAGSPTSTEEGSSTPSGATGSPGTPGSGTASSSPGSSTPSGATGSPGTSTEPSEGSAPGTSTEPSEGSAPGSEPATSGSETPGSPAGSPTSTEEGSPAGSPTSTEEGTSTEPSEGSAPGPEPTGPAPSGGSEPATSGSETPGTSESATPESGPGSPAGSPTSTEEGTSESATPESGPGSPAGSPTSTEEGSPAGSPTSTEEGTSESATPESGPGSPAGSPTSTEEGSPAGSPTSTEEGSTSSTAESPGPGSTSESPSGTAPGTSPSGESSTAPGSTSESPSGTAPGSTSESPSGTAPGTSPSGESSTAPGTSTEPSEGSAPGTSESATPESGPGTSESATPESGPGSEPATSGSETPGTSESATPESGPGTSESATPESGPGTSTEPSEGSAPGTSESATPESGPGTSTEPSEGSAPGTSPSGESSTAPGTSPSGESSTAPGTSPSGESSTAPGTSTEPSEGSAPGSPAGSPTSTEEGTSTEPSEGSAPGSSPSASTGTGPGSSTPSGATGSPGSSTPSGATGSPGSSTPSGATGSPGSSTPSGATGSPGASPGTSSTGSPGASASGAPSTGGTSPSGESSTAPGSTSSTAESPGPGTSPSGESSTAPGTSESATPESGPGTSTEPSEGSAPGTSTEPSEGSAPGSSPSASTGTGPGSSTPSGATGSPGASPGTSSTGSPGTSTPESGSASPGTSPSGESSTAPGTSPSGESSTAPGTSESATPESGPGSEPATSGSETPGTSTEPSEGSAPGSTSESPSGTAPGSTSESPSGTAPGTSTPESGSASPGSPAGSPTSTEEGTSESATPESGPGTSTEPSEGSAPGSPAGSPTSTEEGTSESATPESGPGSEPATSGSETPGSSTPSGATGSPGASPGTSSTGSPGSSTPSGATGSPGSTSESPSGTAPGTSPSGESSTAPGSTSSTAESPGPGSSTPSGATGSPGASPGTSSTGSPGTPGSGTASSSPGSPAGSPTSTEEGSPAGSPTSTEEGTSTEPSEGSAP

SEQ ID NO: 799 - protein, 1067 aa, Artificial Sequence
  Description of Artificial Sequence: Synthetic polypeptide
MAEPAGSPTSTEEGTPGSGTASSSPGSSTPSGATGSPGASPGTSSTGSPGSPAGSPTSTEEGTSESATPESGPGTSTEPSEGSAPGSPAGSPTSTEEGTSTEPSEGSAPGTSTEPSEGSAPGTSESATPESGPGSEPATSGSETPGSEPATSGSETPGSPAGSPTSTEEGTSESATPESGPGTSTEPSEGSAPGTSTEPSEGSAPGSPAGSPTSTEEGTSTEPSEGSAPGTSTEPSEGSAPGTSESATPESGPGTSTEPSEGSAPGTSESATPESGPGSEPATSGSETPGTSTEPSEGSAPGTSTEPSEGSAPGTSESATPESGPGTSESATPESGPGSPAGSPTSTEEGTSESATPESGPGSEPATSGSETPGTSESATPESGPGTSTEPSEGSAPGTSTEPSEGSAPGTSTEPSEGSAPGTSTEPSEGSAPGTSTEPSEGSAPGTSTEPSEGSAPGSPAGSPTSTEEGTSTEPSEGSAPGTSESATPESGPGSEPATSGSETPGTSESATPESGPGSEPATSGSETPGTSESATPESGPGTSTEPSEGSAPGTSESATPESGPGSPAGSPTSTEEGSPAGSPTSTEEGSPAGSPTSTEEGTSESATPESGPGTSTEPSEGSAPGTSESATPESGPGSEPATSGSETPGTSESATPESGPGSEPATSGSETPGTSESATPESGPGTSTEPSEGSAPGSPAGSPTSTEEGTSESATPESGPGSEPATSGSETPGTSESATPESGPGSPAGSPTSTEEGSPAGSPTSTEEGTSTEPSEGSAPGTSESATPESGPGTSESATPESGPGTSESATPESGPGSEPATSGSETPGSEPATSGSETPGSPAGSPTSTEEGTSTEPSEGSAPGTSTEPSEGSAPGSEPATSGSETPGTSESATPESGPGTSTEPSEGSAPGMRPSGRKSSKMQAFRIWDVNQKTFYLRNNQLVAGYLQGPNVNLEEKIDVVPIEPHALFLGIHGGKMCLSCVKSGDETRLQLEAVNITDLSENRKQDKRFAFIRSDSGPTTSFESAACPGWFLCTAMEADQPVSLTNMPDEGVMVTKFYFQEDE

SEQ ID NO: 800 - protein, 1078 aa, Artificial Sequence
  Description of Artificial Sequence: Synthetic polypeptide
MAEPAGSPTSTEEGASPGTSSTGSPGSSTPSGATGSPGSSTPSGATGSPGTSTEPSEGSAPGSEPATSGSETPGSPAGSPTSTEEGSTSSTAESPGPGTSTPESGSASPGSTSESPSGTAPGSTSESPSGTAPGTSTPESGSASPGTSTPESGSASPGSEPATSGSETPGTSESATPESGPGSPAGSPTSTEEGTSTEPSEGSAPGTSESATPESGPGTSTEPSEGSAPGTSTEPSEGSAPGSPAGSPTSTEEGTSTEPSEGSAPGTSTEPSEGSAPGTSESATPESGPGTSESATPESGPGTSTEPSEGSAPGTSTEPSEGSAPGTSESATPESGPGTSTEPSEGSAPGSEPATSGSETPGSPAGSPTSTEEGSSTPSGATGSPGTPGSGTASSSPGSSTPSGATGSPGTSTEPSEGSAPGTSTEPSEGSAPGSEPATSGSETPGSPAGSPTSTEEGSPAGSPTSTEEGTSTEPSEGSAPGASASGAPSTGGTSESATPESGPGSPAGSPTSTEEGSPAGSPTSTEEGSTSSTAESPGPGSTSESPSGTAPGTSPSGESSTAPGTPGSGTASSSPGSSTPSGATGSPGSSPSASTGTGPGSEPATSGSETPGTSESATPESGPGSEPATSGSETPGSTSSTAESPGPGSTSSTAESPGPGTSPSGESSTAPGSEPATSGSETPGSEPATSGSETPGTSTEPSEGSAPGSTSSTAESPGPGTSTPESGSASPGSTSESPSGTAPGTSTEPSEGSAPGTSTEPSEGSAPGTSTEPSEGSAPGSSTPSGATGSPGSSPSASTGTGPGASPGTSSTGSPGSEPATSGSETPGTSESATPESGPGSPAGSPTSTEEGSSTPSGATGSPGSSPSASTGTGPGASPGTSSTGSPGTSESATPESGPGTSTEPSEGSAPGTSTEPSEGSAPGMRPSGRKSSKMQAFRIWDVNQKTFYLRNNQLVAGYLQGPNVNLEEKIDVVPIEPHALFLGIHGGKMCLSCVKSGDETRLQLEAVNITDLSENRKQDKRFAFIRSDSGPTTSFESAACPGWFLCTAMEADQPVSLTNMPDEGVMVTKFYFQEDE

SEQ ID NO: 801 - protein, 298 aa, Artificial Sequence
  Description of Artificial Sequence: Synthetic polypeptide
GSEPATSGSETPGTSESATPESGPGSEPATSGSETPGSPAGSPTSTEEGTSTEPSEGSAPGSEPATSGSETPGSEPATSGSETPGSEPATSGSETPGTSTEPSEGSAPGTSESATPESGPGSEPATSGSETPGTSTEPSEGSAPGMRPSGRKSSKMQAFRIWDVNQKTFYLRNNQLVAGYLQGPNVNLEEKIDVVPIEPHALFLGIHGGKMCLSCVKSGDETRLQLEAVNITDLSENRKQDKRFAFIRSDSGPTTSFESAACPGWFLCTAMEADQPVSLTNMPDEGVMVTKFYFQEDE

SEQ ID NO: 802 - protein, 298 aa, Artificial Sequence
  Description of Artificial Sequence: Synthetic polypeptide
GTSTPESGSASPGTSPSGESSTAPGTSPSGESSTAPGSTSSTAESPGPGSTSESPSGTAPGSTSSTAESPGPGTSPSGESSTAPGTSTPESGSASPGSTSSTAESPGPGTSPSGESSTAPGTSPSGESSTAPGTSPSGESSTAPGMRPSGRKSSKMQAFRIWDVNQKTFYLRNNQLVAGYLQGPNVNLEEKIDVVPIEPHALFLGIHGGKMCLSCVKSGDETRLQLEAVNITDLSENRKQDKRFAFIRSDSGPTTSFESAACPGWFLCTAMEADQPVSLTNMPDEGVMVTKFYFQEDE

SEQ ID NO: 803 - protein, 442 aa, Artificial Sequence
  Description of Artificial Sequence: Synthetic polypeptide
GTSESATPESGPGSEPATSGSETPGTSESATPESGPGSEPATSGSETPGTSESATPESGPGTSTEPSEGSAPGSPAGSPTSTEEGTSESATPESGPGSEPATSGSETPGTSESATPESGPGSPAGSPTSTEEGSPAGSPTSTEEGTSTEPSEGSAPGTSESATPESGPGTSESATPESGPGTSESATPESGPGSEPATSGSETPGSEPATSGSETPGSPAGSPTSTEEGTSTEPSEGSAPGTSTEPSEGSAPGSEPATSGSETPGTSESATPESGPGTSTEPSEGSAPGMRPSGRKSSKMQAFRIWDVNQKTFYLRNNQLVAGYLQGPNVNLEEKIDVVPIEPHALFLGIHGGKMCLSCVKSGDETRLQLEAVNITDLSENRKQDKRFAFIRSDSGPTTSFESAACPGWFLCTAMEADQPVSLTNMPDEGVMVTKFYFQEDE

SEQ ID NO: 804 - protein, 730 aa, Artificial Sequence
  Description of Artificial Sequence: Synthetic polypeptide
GSPAGSPTSTEEGTSESATPESGPGTSTEPSEGSAPGSPAGSPTSTEEGTSTEPSEGSAPGTSTEPSEGSAPGTSESATPESGPGSEPATSGSETPGSEPATSGSETPGSPAGSPTSTEEGTSESATPESGPGTSTEPSEGSAPGTSTEPSEGSAPGSPAGSPTSTEEGTSTEPSEGSAPGTSTEPSEGSAPGTSESATPESGPGTSTEPSEGSAPGTSESATPESGPGSEPATSGSETPGTSTEPSEGSAPGTSTEPSEGSAPGTSESATPESGPGTSESATPESGPGSPAGSPTSTEEGTSESATPESGPGSEPATSGSETPGTSESATPESGPGTSTEPSEGSAPGTSTEPSEGSAPGTSTEPSEGSAPGTSTEPSEGSAPGTSTEPSEGSAPGTSTEPSEGSAPGSPAGSPTSTEEGTSTEPSEGSAPGTSESATPESGPGSEPATSGSETPGTSESATPESGPGSEPATSGSETPGTSESATPESGPGTSTEPSEGSAPGTSESATPESGPGSPAGSPTSTEEGSPAGSPTSTEEGSPAGSPTSTEEGTSESATPESGPGTSTEPSEGSAPGMRPSGRKSSKMQAFRIWDVNQKTFYLRNNQLVAGYLQGPNVNLEEKIDVVPIEPHALFLGIHGGKMCLSCVKSGDETRLQLEAVNITDLSENRKQDKRFAFIRSDSGPTTSFESAACPGWFLCTAMEADQPVSLTNMPDEGVMVTKFYFQEDE

SEQ ID NO: 805 - protein, 730 aa, Artificial Sequence
  Description of Artificial Sequence: Synthetic polypeptide
GSTSSTAESPGPGSTSSTAESPGPGSTSESPSGTAPGSTSSTAESPGPGSTSSTAESPGPGTSTPESGSASPGSTSESPSGTAPGTSPSGESSTAPGSTSESPSGTAPGSTSESPSGTAPGTSPSGESSTAPGSTSESPSGTAPGSTSESPSGTAPGTSPSGESSTAPGSTSESPSGTAPGSTSESPSGTAPGSTSESPSGTAPGTSTPESGSASPGSTSESPSGTAPGTSTPESGSASPGSTSSTAESPGPGSTSSTAESPGPGTSTPESGSASPGTSTPESGSASPGSTSESPSGTAPGTSTPESGSASPGTSTPESGSASPGSTSESPSGTAPGSTSESPSGTAPGSTSESPSGTAPGSTSSTAESPGPGTSTPESGSASPGTSTPESGSASPGSTSESPSGTAPGSTSESPSGTAPGTSTPESGSASPGSTSESPSGTAPGSTSESPSGTAPGTSTPESGSASPGTSPSGESSTAPGSTSSTAESPGPGTSPSGESSTAPGSTSSTAESPGPGTSTPESGSASPGSTSESPSGTAPGSTSSTAESPGPGTSTPESGSASPGTSTPESGSASPGMRPSGRKSSKMQAFRIWDVNQKTFYLRNNQLVAGYLQGPNVNLEEKIDVVPIEPHALFLGIHGGKMCLSCVKSGDETRLQLEAVNITDLSENRKQDKRFAFIRSDSGPTTSFESAACPGWFLCTAMEADQPVSLTNMPDEGVMVTKFYFQEDE

SEQ ID NO: 806 - protein, 990 aa, Artificial Sequence
  Description of Artificial Sequence: Synthetic polypeptide
GSSESGSSEGGPGSSESGSSEGGPGESPGGSSGSESGSGGEPSESGSSGESPGGSSGSESGESPGGSSGSESGSSESGSSEGGPGSSESGSSEGGPGSSESGSSEGGPGESPGGSSGSESGESPGGSSGSESGESPGGSSGSESGSSESGSSEGGPGSSESGSSEGGPGSSESGSSEGGPGSSESGSSEGGPGSSESGSSEGGPGSSESGSSEGGPGSGGEPSESGSSGESPGGSSGSESGESPGGSSGSESGSGGEPSESGSSGSEGSSGPGESSGSSESGSSEGGPGSGGEPSESGSSGSEGSSGPGESSGSSESGSSEGGPGSGGEPSESGSSGESPGGSSGSESGSGGEPSESGSSGSGGEPSESGSSGSSESGSSEGGPGSGGEPSESGSSGSGGEPSESGSSGSEGSSGPGESSGESPGGSSGSESGSEGSSGPGESSGSEGSSGPGESSGSGGEPSESGSSGSSESGSSEGGPGSSESGSSEGGPGESPGGSSGSESGSGGEPSESGSSGSEGSSGPGESSGESPGGSSGSESGSEGSSGPGSSESGSSEGGPGSGGEPSESGSSGSEGSSGPGESSGSEGSSGPGESSGSEGSSGPGESSGSGGEPSESGSSGSGGEPSESGSSGESPGGSSGSESGESPGGSSGSESGSGGEPSESGSSGSEGSSGPGESSGESPGGSSGSESGSSESGSSEGGPGSSESGSSEGGPGSSESGSSEGGPGSGGEPSESGSSGSSESGSSEGGPGESPGGSSGSESGSGGEPSESGSSGSSESGSSEGGPGESPGGSSGSESGSGGEPSESGSSGESPGGSSGSESGSGGEPSESGSSGMRPSGRKSSKMQAFRIWDVNQKTFYLRNNQLVAGYLQGPNVNLEEKIDVVPIEPHALFLGIHGGKMCLSCVKSGDETRLQLEAVNITDLSENRKQDKRFAFIRSDSGPTTSFESAACPGWFLCTAMEADQPVSLTNMPDEGVMVTKFYFQEDE

SEQ ID NO: 807 - protein, 1018 aa, Artificial Sequence
  Description of Artificial Sequence: Synthetic polypeptide
GSPAGSPTSTEEGTSESATPESGPGTSTEPSEGSAPGSPAGSPTSTEEGTSTEPSEGSAPGTSTEPSEGSAPGTSESATPESGPGSEPATSGSETPGSEPATSGSETPGSPAGSPTSTEEGTSESATPESGPGTSTEPSEGSAPGTSTEPSEGSAPGSPAGSPTSTEEGTSTEPSEGSAPGTSTEPSEGSAPGTSESATPESGPGTSTEPSEGSAPGTSESATPESGPGSEPATSGSETPGTSTEPSEGSAPGTSTEPSEGSAPGTSESATPESGPGTSESATPESGPGSPAGSPTSTEEGTSESATPESGPGSEPATSGSETPGTSESATPESGPGTSTEPSEGSAPGTSTEPSEGSAPGTSTEPSEGSAPGTSTEPSEGSAPGTSTEPSEGSAPGTSTEPSEGSAPGSPAGSPTSTEEGTSTEPSEGSAPGTSESATPESGPGSEPATSGSETPGTSESATPESGPGSEPATSGSETPGTSESATPESGPGTSTEPSEGSAPGTSESATPESGPGSPAGSPTSTEEGSPAGSPTSTEEGSPAGSPTSTEEGTSESATPESGPGTSTEPSEGSAPGTSESATPESGPGSEPATSGSETPGTSESATPESGPGSEPATSGSETPGTSESATPESGPGTSTEPSEGSAPGSPAGSPTSTEEGTSESATPESGPGSEPATSGSETPGTSESATPESGPGSPAGSPTSTEEGSPAGSPTSTEEGTSTEPSEGSAPGTSESATPESGPGTSESATPESGPGTSESATPESGPGSEPATSGSETPGSEPATSGSETPGSPAGSPTSTEEGTSTEPSEGSAPGTSTEPSEGSAPGSEPATSGSETPGTSESATPESGPGTSTEPSEGSAPGMRPSGRKSSKMQAFRIWDVNQKTFYLRNNQLVAGYLQGPNVNLEEKIDVVPIEPHALFLGIHGGKMCLSCVKSGDETRLQLEAVNITDLSENRKQDKRFAFIRSDSGPTTSFESAACPGWFLCTAMEADQPVSLTNMPDEGVMVTKFYFQEDE

SEQ ID NO: 808 - protein, 1029 aa, Artificial Sequence
  Description of Artificial Sequence: Synthetic polypeptide
  MOD_RES (430)..(432): Any amino acid
  MOD_RES (443)..(446): Any amino acid
GSTSESPSGTAPGTSPSGESSTAPGSTSESPSGTAPGSTSESPSGTAPGTSTPESGSASPGTSTPESGSASPGSTSESPSGTAPGSTSESPSGTAPGTSPSGESSTAPGSTSESPSGTAPGTSPSGESSTAPGTSPSGESSTAPGSTSSTAESPGPGTSPSGESSTAPGTSPSGESSTAPGSTSSTAESPGPGTSTPESGSASPGTSTPESGSASPGSTSESPSGTAPGSTSESPSGTAPGTSTPESGSASPGSTSSTAESPGPGTSTPESGSASPGSTSESPSGTAPGTSPSGESSTAPGSTSSTAESPGPGTSPSGESSTAPGTSTPESGSASPGSTSSTAESPGPGSTSSTAESPGPGSTSSTAESPGPGSTSSTAESPGPGTSPSGESSTAPGSTSESPSGTAPGSTSESPSGTAPGTSTPESGPXXXGASASGAPSTXXXXSESPSGTAPGSTSESPSGTAPGSTSESPSGTAPGSTSESPSGTAPGSTSESPSGTAPGSTSESPSGTAPGTSTPESGSASPGTSPSGESSTAPGTSPSGESSTAPGSTSSTAESPGPGTSPSGESSTAPGTSTPESGSASPGSTSESPSGTAPGSTSESPSGTAPGTSPSGESSTAPGSTSESPSGTAPGTSTPESGSASPGTSTPESGSASPGSTSESPSGTAPGTSTPESGSASPGSTSSTAESPGPGSTSESPSGTAPGSTSESPSGTAPGTSPSGESSTAPGSTSSTAESPGPGTSPSGESSTAPGTSTPESGSASPGTSPSGESSTAPGTSPSGESSTAPGTSPSGESSTAPGSTSSTAESPGPGSTSSTAESPGPGTSPSGESSTAPGSSPSASTGTGPGSSTPSGATGSPGSSTPSGATGSPGMRPSGRKSSKMQAFRIWDVNQKTFYLRNNQLVAGYLQGPNVNLEEKIDVVPIEPHALFLGIHGGKMCLSCVKSGDETRLQLEAVNITDLSENRKQDKRFAFIRSDSGPTTSFESAACPGWFLCTAMEADQPVSLTNMPDEGVMVTKFYFQEDE

SEQ ID NO: 809 - protein, 1018 aa, Artificial Sequence
  Description of Artificial Sequence: Synthetic polypeptide
GASPGTSSTGSPGSSPSASTGTGPGSSPSASTGTGPGTPGSGTASSSPGSSTPSGATGSPGSNPSASTGTGPGASPGTSSTGSPGTPGSGTASSSPGSSTPSGATGSPGTPGSGTASSSPGASPGTSSTGSPGASPGTSSTGSPGTPGSGTASSSPGSSTPSGATGSPGASPGTSSTGSPGTPGSGTASSSPGSSTPSGATGSPGSNPSASTGTGPGSSPSASTGTGPGSSTPSGATGSPGSSTPSGATGSPGASPGTSSTGSPGASPGTSSTGSPGASPGTSSTGSPGTPGSGTASSSPGASPGTSSTGSPGASPGTSSTGSPGASPGTSSTGSPGSSPSASTGTGPGTPGSGTASSSPGASPGTSSTGSPGASPGTSSTGSPGASPGTSSTGSPGSSTPSGATGSPGSSTPSGATGSPGASPGTSSTGSPGTPGSGTASSSPGSSTPSGATGSPGSSTPSGATGSPGSSTPSGATGSPGSSPSASTGTGPGASPGTSSTGSPGASPGTSSTGSPGTPGSGTASSSPGASPGTSSTGSPGASPGTSSTGSPGASPGTSSTGSPGASPGTSSTGSPGTPGSGTASSSPGSSTPSGATGSPGTPGSGTASSSPGSSTPSGATGSPGTPGSGTASSSPGSSTPSGATGSPGSSTPSGATGSPGSSPSASTGTGPGSSPSASTGTGPGASPGTSSTGSPGTPGSGTASSSPGSSTPSGATGSPGSSPSASTGTGPGSSPSASTGTGPGASPGTSSTGSPGASPGTSSTGSPGSSTPSGATGSPGSSPSASTGTGPGASPGTSSTGSPGSSPSASTGTGPGTPGSGTASSSPGSSTPSGATGSPGSSTPSGATGSPGASPGTSSTGSPGMRPSGRKSSKMQAFRIWDVNQKTFYLRNNQLVAGYLQGPNVNLEEKIDVVPIEPHALFLGIHGGKMCLSCVKSGDETRLQLEAVNITDLSENRKQDKRFAFIRSDSGPTTSFESAACPGWFLCTAMEADQPVSLTNMPDEGVMVTKFYFQEDE

SEQ ID NO: 810 - protein, 1029 aa, Artificial Sequence
  Description of Artificial Sequence: Synthetic polypeptide
GTSTEPSEGSAPGSEPATSGSETPGSPAGSPTSTEEGSTSSTAESPGPGTSTPESGSASPGSTSESPSGTAPGSTSESPSGTAPGTSTPESGSASPGTSTPESGSASPGSEPATSGSETPGTSESATPESGPGSPAGSPTSTEEGTSTEPSEGSAPGTSESATPESGPGTSTEPSEGSAPGTSTEPSEGSAPGSPAGSPTSTEEGTSTEPSEGSAPGTSTEPSEGSAPGTSESATPESGPGTSESATPESGPGTSTEPSEGSAPGTSTEPSEGSAPGTSESATPESGPGTSTEPSEGSAPGSEPATSGSETPGSPAGSPTSTEEGSSTPSGATGSPGTPGSGTASSSPGSSTPSGATGSPGTSTEPSEGSAPGTSTEPSEGSAPGSEPATSGSETPGSPAGSPTSTEEGSPAGSPTSTEEGTSTEPSEGSAPGASASGAPSTGGTSESATPESGPGSPAGSPTSTEEGSPAGSPTSTEEGSTSSTAESPGPGSTSESPSGTAPGTSPSGESSTAPGTPGSGTASSSPGSSTPSGATGSPGSSPSASTGTGPGSEPATSGSETPGTSESATPESGPGSEPATSGSETPGSTSSTAESPGPGSTSSTAESPGPGTSPSGESSTAPGSEPATSGSETPGSEPATSGSETPGTSTEPSEGSAPGSTSSTAESPGPGTSTPESGSASPGSTSESPSGTAPGTSTEPSEGSAPGTSTEPSEGSAPGTSTEPSEGSAPGSSTPSGATGSPGSSPSASTGTGPGASPGTSSTGSPGSEPATSGSETPGTSESATPESGPGSPAGSPTSTEEGSSTPSGATGSPGSSPSASTGTGPGASPGTSSTGSPGTSESATPESGPGTSTEPSEGSAPGTSTEPSEGSAPGMRPSGRKSSKMQAFRIWDVNQKTFYLRNNQLVAGYLQGPNVNLEEKIDVVPIEPHALFLGIHGGKMCLSCVKSGDETRLQLEAVNITDLSENRKQDKRFAFIRSDSGPTTSFESAACPGWFLCTAMEADQPVSLTNMPDEGVMVTKFYFQEDE

SEQ ID NO: 811 - protein, 1472 aa, Artificial Sequence
  Description of Artificial Sequence: Synthetic polypeptide
GTSTEPSEGSAPGSEPATSGSETPGSPAGSPTSTEEGSTSSTAESPGPGTSTPESGSASPGSTSESPSGTAPGSTSESPSGTAPGTSTPESGSASPGTSTPESGSASPGSEPATSGSETPGTSESATPESGPGSPAGSPTSTEEGTSTEPSEGSAPGTSESATPESGPGTSTEPSEGSAPGTSTEPSEGSAPGSPAGSPTSTEEGTSTEPSEGSAPGTSTEPSEGSAPGTSESATPESGPGTSESATPESGPGTSTEPSEGSAPGTSTEPSEGSAPGTSESATPESGPGTSTEPSEGSAPGSEPATSGSETPGSPAGSPTSTEEGSSTPSGATGSPGTPGSGTASSSPGSSTPSGATGSPGTSTEPSEGSAPGTSTEPSEGSAPGSEPATSGSETPGSPAGSPTSTEEGSPAGSPTSTEEGTSTEPSEGSAPGPEPTGPAPSGGSEPATSGSETPGTSESATPESGPGSPAGSPTSTEEGTSESATPESGPGSPAGSPTSTEEGSPAGSPTSTEEGTSESATPESGPGSPAGSPTSTEEGSPAGSPTSTEEGSTSSTAESPGPGSTSESPSGTAPGTSPSGESSTAPGSTSESPSGTAPGSTSESPSGTAPGTSPSGESSTAPGTSTEPSEGSAPGTSESATPESGPGTSESATPESGPGSEPATSGSETPGTSESATPESGPGTSESATPESGPGTSTEPSEGSAPGTSESATPESGPGTSTEPSEGSAPGTSPSGESSTAPGTSPSGESSTAPGTSPSGESSTAPGTSTEPSEGSAPGSPAGSPTSTEEGTSTEPSEGSAPGSSPSASTGTGPGSSTPSGATGSPGSSTPSGATGSPGSSTPSGATGSPGSSTPSGATGSPGASPGTSSTGSPGASASGAPSTGGTSPSGESSTAPGSTSSTAESPGPGTSPSGESSTAPGTSESATPESGPGTSTEPSEGSAPGTSTEPSEGSAPGSSPSASTGTGPGSSTPSGATGSPGASPGTSSTGSPGTSTPESGSASPGTSPSGESSTAPGTSPSGESSTAPGTSESATPESGPGSEPATSGSETPGTSTEPSEGSAPGSTSESPSGTAPGSTSESPSGTAPGTSTPESGSASPGSPAGSPTSTEEGTSESATPESGPGTSTEPSEGSAPGSPAGSPTSTEEGTSESATPESGPGSEPATSGSETPGSSTPSGATGSPGASPGTSSTGSPGSSTPSGATGSPGSTSESPSGTAPGTSPSGESSTAPGSTSSTAESPGPGSSTPSGATGSPGASPGTSSTGSPGTPGSGTASSSPGSPAGSPTSTEEGSPAGSPTSTEEGTSTEPSEGSAPGMRPSGRKSSKMQAFRIWDVNQKTFYLRNNQLVAGYLQGPNVNLEEKIDVVPIEPHALFLGIHGGKMCLSCVKSGDETRLQLEAVNITDLSENRKQDKRFAFIRSDSGPTTSFESAACPGWFLCTAMEADQPVSLTNMPDEGVMVTKFYFQEDE

SEQ ID NO: 812 - protein, 321 aa, Artificial Sequence
  Description of Artificial Sequence: Synthetic polypeptide
CGNLSTCMLGTYTQDFNKFHTFPQTAIGVGAPGGTSESATPESGPGSEPATSGSETPGTSESATPESGPGSEPATSGSETPGTSESATPESGPGTSTEPSEGSAPGSPAGSPTSTEEGTSESATPESGPGSEPATSGSETPGTSESATPESGPGSPAGSPTSTEEGSPAGSPTSTEEGTSTEPSEGSAPGTSESATPESGPGTSESATPESGPGTSESATPESGPGSEPATSGSETPGSEPATSGSETPGSPAGSPTSTEEGTSTEPSEGSAPGTSTEPSEGSAPGSEPATSGSETPGTSESATPESGPGTSTEPSEGSAP

SEQ ID NO: 813 - protein, 609 aa, Artificial Sequence
  Description of Artificial Sequence: Synthetic polypeptide
CGNLSTCMLGTYTQDFNKFHTFPQTAIGVGAPGGSPAGSPTSTEEGTSESATPESGPGTSTEPSEGSAPGSPAGSPTSTEEGTSTEPSEGSAPGTSTEPSEGSAPGTSESATPESGPGSEPATSGSETPGSEPATSGSETPGSPAGSPTSTEEGTSESATPESGPGTSTEPSEGSAPGTSTEPSEGSAPGSPAGSPTSTEEGTSTEPSEGSAPGTSTEPSEGSAPGTSESATPESGPGTSTEPSEGSAPGTSESATPESGPGSEPATSGSETPGTSTEPSEGSAPGTSTEPSEGSAPGTSESATPESGPGTSESATPESGPGSPAGSPTSTEEGTSESATPESGPGSEPATSGSETPGTSESATPESGPGTSTEPSEGSAPGTSTEPSEGSAPGTSTEPSEGSAPGTSTEPSEGSAPGTSTEPSEGSAPGTSTEPSEGSAPGSPAGSPTSTEEGTSTEPSEGSAPGTSESATPESGPGSEPATSGSETPGTSESATPESGPGSEPATSGSETPGTSESATPESGPGTSTEPSEGSAPGTSESATPESGPGSPAGSPTSTEEGSPAGSPTSTEEGSPAGSPTSTEEGTSESATPESGPGTSTEPSEGSAP

SEQ ID NO: 814 - protein, 609 aa, Artificial Sequence
  Description of Artificial Sequence: Synthetic polypeptide
CGNLSTCMLGTYTQDFNKFHTFPQTAIGVGAPGGSTSSTAESPGPGSTSSTAESPGPGSTSESPSGTAPGSTSSTAESPGPGSTSSTAESPGPGTSTPESGSASPGSTSESPSGTAPGTSPSGESSTAPGSTSESPSGTAPGSTSESPSGTAPGTSPSGESSTAPGSTSESPSGTAPGSTSESPSGTAPGTSPSGESSTAPGSTSESPSGTAPGSTSESPSGTAPGSTSESPSGTAPGTSTPESGSASPGSTSESPSGTAPGTSTPESGSASPGSTSSTAESPGPGSTSSTAESPGPGTSTPESGSASPGTSTPESGSASPGSTSESPSGTAPGTSTPESGSASPGTSTPESGSASPGSTSESPSGTAPGSTSESPSGTAPGSTSESPSGTAPGSTSSTAESPGPGTSTPESGSASPGTSTPESGSASPGSTSESPSGTAPGSTSESPSGTAPGTSTPESGSASPGSTSESPSGTAPGSTSESPSGTAPGTSTPESGSASPGTSPSGESSTAPGSTSSTAESPGPGTSPSGESSTAPGSTSSTAESPGPGTSTPESGSASPGSTSESPSGTAPGSTSSTAESPGPGTSTPESGSASPGTSTPESGSASP

SEQ ID NO: 815 - protein, 869 aa, Artificial Sequence
  Description of Artificial Sequence: Synthetic polypeptide
CGNLSTCMLGTYTQDFNKFHTFPQTAIGVGAPGGSSESGSSEGGPGSSESGSSEGGPGESPGGSSGSESGSGGEPSESGSSGESPGGSSGSESGESPGGSSGSESGSSESGSSEGGPGSSESGSSEGGPGSSESGSSEGGPGESPGGSSGSESGESPGGSSGSESGESPGGSSGSESGSSESGSSEGGPGSSESGSSEGGPGSSESGSSEGGPGSSESGSSEGGPGSSESGSSEGGPGSSESGSSEGGPGSGGEPSESGSSGESPGGSSGSESGESPGGSSGSESGSGGEPSESGSSGSEGSSGPGESSGSSESGSSEGGPGSGGEPSESGSSGSEGSSGPGESSGSSESGSSEGGPGSGGEPSESGSSGESPGGSSGSESGSGGEPSESGSSGSGGEPSESGSSGSSESGSSEGGPGSGGEPSESGSSGSGGEPSESGSSGSEGSSGPGESSGESPGGSSGSESGSEGSSGPGESSGSEGSSGPGESSGSGGEPSESGSSGSSESGSSEGGPGSSESGSSEGGPGESPGGSSGSESGSGGEPSESGSSGSEGSSGPGESSGESPGGSSGSESGSEGSSGPGSSESGSSEGGPGSGGEPSESGSSGSEGSSGPGESSGSEGSSGPGESSGSEGSSGPGESSGSGGEPSESGSSGSGGEPSESGSSGESPGGSSGSESGESPGGSSGSESGSGGEPSESGSSGSEGSSGPGESSGESPGGSSGSESGSSESGSSEGGPGSSESGSSEGGPGSSESGSSEGGPGSGGEPSESGSSGSSESGSSEGGPGESPGGSSGSESGSGGEPSESGSSGSSESGSSEGGPGESPGGSSGSESGSGGEPSESGSSGESPGGSSGSESGSGGEPSESGSS

SEQ ID NO: 816 - protein, 897 aa, Artificial Sequence
  Description of Artificial Sequence: Synthetic polypeptide
CGNLSTCMLGTYTQDFNKFHTFPQTAIGVGAPGGSPAGSPTSTEEGTSESATPESGPGTSTEPSEGSAPGSPAGSPTSTEEGTSTEPSEGSAPGTSTEPSEGSAPGTSESATPESGPGSEPATSGSETPGSEPATSGSETPGSPAGSPTSTEEGTSESATPESGPGTSTEPSEGSAPGTSTEPSEGSAPGSPAGSPTSTEEGTSTEPSEGSAPGTSTEPSEGSAPGTSESATPESGPGTSTEPSEGSAPGTSESATPESGPGSEPATSGSETPGTSTEPSEGSAPGTSTEPSEGSAPGTSESATPESGPGTSESATPESGPGSPAGSPTSTEEGTSESATPESGPGSEPATSGSETPGTSESATPESGPGTSTEPSEGSAPGTSTEPSEGSAPGTSTEPSEGSAPGTSTEPSEGSAPGTSTEPSEGSAPGTSTEPSEGSAPGSPAGSPTSTEEGTSTEPSEGSAPGTSESATPESGPGSEPATSGSETPGTSESATPESGPGSEPATSGSETPGTSESATPESGPGTSTEPSEGSAPGTSESATPESGPGSPAGSPTSTEEGSPAGSPTSTEEGSPAGSPTSTEEGTSESATPESGPGTSTEPSEGSAPGTSESATPESGPGSEPATSGSETPGTSESATPESGPGSEPATSGSETPGTSESATPESGPGTSTEPSEGSAPGSPAGSPTSTEEGTSESATPESGPGSEPATSGSETPGTSESATPESGPGSPAGSPTSTEEGSPAGSPTSTEEGTSTEPSEGSAPGTSESATPESGPGTSESATPESGPGTSESATPESGPGSEPATSGSETPGSEPATSGSETPGSPAGSPTSTEEGTSTEPSEGSAPGTSTEPSEGSAPGSEPATSGSETPGTSESATPESGPGTSTEPSEGSAP

SEQ ID NO: 817 - protein, 908 aa, Artificial Sequence
  Description of Artificial Sequence: Synthetic polypeptide
  MOD_RES (463)..(465): Any amino acid
  MOD_RES (476)..(479): Any amino acid
CGNLSTCMLGTYTQDFNKFHTFPQTAIGVGAPGGSTSESPSGTAPGTSPSGESSTAPGSTSESPSGTAPGSTSESPSGTAPGTSTPESGSASPGTSTPESGSASPGSTSESPSGTAPGSTSESPSGTAPGTSPSGESSTAPGSTSESPSGTAPGTSPSGESSTAPGTSPSGESSTAPGSTSSTAESPGPGTSPSGESSTAPGTSPSGESSTAPGSTSSTAESPGPGTSTPESGSASPGTSTPESGSASPGSTSESPSGTAPGSTSESPSGTAPGTSTPESGSASPGSTSSTAESPGPGTSTPESGSASPGSTSESPSGTAPGTSPSGESSTAPGSTSSTAESPGPGTSPSGESSTAPGTSTPESGSASPGSTSSTAESPGPGSTSSTAESPGPGSTSSTAESPGPGSTSSTAESPGPGTSPSGESSTAPGSTSESPSGTAPGSTSESPSGTAPGTSTPESGPXXXGASASGAPSTXXXXSESPSGTAPGSTSESPSGTAPGSTSESPSGTAPGSTSESPSGTAPGSTSESPSGTAPGSTSESPSGTAPGTSTPESGSASPGTSPSGESSTAPGTSPSGESSTAPGSTSSTAESPGPGTSPSGESSTAPGTSTPESGSASPGSTSESPSGTAPGSTSESPSGTAPGTSPSGESSTAPGSTSESPSGTAPGTSTPESGSASPGTSTPESGSASPGSTSESPSGTAPGTSTPESGSASPGSTSSTAESPGPGSTSESPSGTAPGSTSESPSGTAPGTSPSGESSTAPGSTSSTAESPGPGTSPSGESSTAPGTSTPESGSASPGTSPSGESSTAPGTSPSGESSTAPGTSPSGESSTAPGSTSSTAESPGPGSTSSTAESPGPGTSPSGESSTAPGSSPSASTGTGPGSSTPSGATGSPGSSTPSGATGSP

SEQ ID NO: 818 - protein, 897 aa, Artificial Sequence
  Description of Artificial Sequence: Synthetic polypeptide
CGNLSTCMLGTYTQDFNKFHTFPQTAIGVGAPGGASPGTSSTGSPGSSPSASTGTGPGSSPSASTGTGPGTPGSGTASSSPGSSTPSGATGSPGSNPSASTGTGPGASPGTSSTGSPGTPGSGTASSSPGSSTPSGATGSPGTPGSGTASSSPGASPGTSSTGSPGASPGTSSTGSPGTPGSGTASSSPGSSTPSGATGSPGASPGTSSTGSPGTPGSGTASSSPGSSTPSGATGSPGSNPSASTGTGPGSSPSASTGTGPGSSTPSGATGSPGSSTPSGATGSPGASPGTSSTGSPGASPGTSSTGSPGASPGTSSTGSPGTPGSGTASSSPGASPGTSSTGSPGASPGTSSTGSPGASPGTSSTGSPGSSPSASTGTGPGTPGSGTASSSPGASPGTSSTGSPGASPGTSSTGSPGASPGTSSTGSPGSSTPSGATGSPGSSTPSGATGSPGASPGTSSTGSPGTPGSGTASSSPGSSTPSGATGSPGSSTPSGATGSPGSSTPSGATGSPGSSPSASTGTGPGASPGTSSTGSPGASPGTSSTGSPGTPGSGTASSSPGASPGTSSTGSPGASPGTSSTGSPGASPGTSSTGSPGASPGTSSTGSPGTPGSGTASSSPGSSTPSGATGSPGTPGSGTASSSPGSSTPSGATGSPGTPGSGTASSSPGSSTPSGATGSPGSSTPSGATGSPGSSPSASTGTGPGSSPSASTGTGPGASPGTSSTGSPGTPGSGTASSSPGSSTPSGATGSPGSSPSASTGTGPGSSPSASTGTGPGASPGTSSTGSPGASPGTSSTGSPGSSTPSGATGSPGSSPSASTGTGPGASPGTSSTGSPGSSPSASTGTGPGTPGSGTASSSPGSSTPSGATGSPGSSTPSGATGSPGASPGTSSTGSP

SEQ ID NO: 819 - protein, 908 aa, Artificial Sequence
  Description of Artificial Sequence: Synthetic polypeptide
CGNLSTCMLGTYTQDFNKFHTFPQTAIGVGAPGGTSTEPSEGSAPGSEPATSGSETPGSPAGSPTSTEEGSTSSTAESPGPGTSTPESGSASPGSTSESPSGTAPGSTSESPSGTAPGTSTPESGSASPGTSTPESGSASPGSEPATSGSETPGTSESATPESGPGSPAGSPTSTEEGTSTEPSEGSAPGTSESATPESGPGTSTEPSEGSAPGTSTEPSEGSAPGSPAGSPTSTEEGTSTEPSEGSAPGTSTEPSEGSAPGTSESATPESGPGTSESATPESGPGTSTEPSEGSAPGTSTEPSEGSAPGTSESATPESGPGTSTEPSEGSAPGSEPATSGSETPGSPAGSPTSTEEGSSTPSGATGSPGTPGSGTASSSPGSSTPSGATGSPGTSTEPSEGSAPGTSTEPSEGSAPGSEPATSGSETPGSPAGSPTSTEEGSPAGSPTSTEEGTSTEPSEGSAPGASASGAPSTGGTSESATPESGPGSPAGSPTSTEEGSPAGSPTSTEEGSTSSTAESPGPGSTSESPSGTAPGTSPSGESSTAPGTPGSGTASSSPGSSTPSGATGSPGSSPSASTGTGPGSEPATSGSETPGTSESATPESGPGSEPATSGSETPGSTSSTAESPGPGSTSSTAESPGPGTSPSGESSTAPGSEPATSGSETPGSEPATSGSETPGTSTEPSEGSAPGSTSSTAESPGPGTSTPESGSASPGSTSESPSGTAPGTSTEPSEGSAPGTSTEPSEGSAPGTSTEPSEGSAPGSSTPSGATGSPGSSPSASTGTGPGASPGTSSTGSPGSEPATSGSETPGTSESATPESGPGSPAGSPTSTEEGSSTPSGATGSPGSSPSASTGTGPGASPGTSSTGSPGTSESATPESGPGTSTEPSEGSAPGTSTEPSEGSAP

SEQ ID NO: 820 - protein, 1351 aa, Artificial Sequence
  Description of Artificial Sequence: Synthetic polypeptide
CGNLSTCMLGTYTQDFNKFHTFPQTAIGVGAPGGTSTEPSEGSAPGSEPATSGSETPGSPAGSPTSTEEGSTSSTAESPGPGTSTPESGSASPGSTSESPSGTAPGSTSESPSGTAPGTSTPESGSASPGTSTPESGSASPGSEPATSGSETPGTSESATPESGPGSPAGSPTSTEEGTSTEPSEGSAPGTSESATPESGPGTSTEPSEGSAPGTSTEPSEGSAPGSPAGSPTSTEEGTSTEPSEGSAPGTSTEPSEGSAPGTSESATPESGPGTSESATPESGPGTSTEPSEGSAPGTSTEPSEGSAPGTSESATPESGPGTSTEPSEGSAPGSEPATSGSETPGSPAGSPTSTEEGSSTPSGATGSPGTPGSGTASSSPGSSTPSGATGSPGTSTEPSEGSAPGTSTEPSEGSAPGSEPATSGSETPGSPAGSPTSTEEGSPAGSPTSTEEGTSTEPSEGSAPGPEPTGPAPSGGSEPATSGSETPGTSESATPESGPGSPAGSPTSTEEGTSESATPESGPGSPAGSPTSTEEGSPAGSPTSTEEGTSESATPESGPGSPAGSPTSTEEGSPAGSPTSTEEGSTSSTAESPGPGSTSESPSGTAPGTSPSGESSTAPGSTSESPSGTAPGSTSESPSGTAPGTSPSGESSTAPGTSTEPSEGSAPGTSESATPESGPGTSESATPESGPGSEPATSGSETPGTSESATPESGPGTSESATPESGPGTSTEPSEGSAPGTSESATPESGPGTSTEPSEGSAPGTSPSGESSTAPGTSPSGESSTAPGTSPSGESSTAPGTSTEPSEGSAPGSPAGSPTSTEEGTSTEPSEGSAPGSSPSASTGTGPGSSTPSGATGSPGSSTPSGATGSPGSSTPSGATGSPGSSTPSGATGSPGASPGTSSTGSPGASASGAPSTGGTSPSGESSTAPGSTSSTAESPGPGTSPSGESSTAPGTSESATPESGPGTSTEPSEGSAPGTSTEPSEGSAPGSSPSASTGTGPGSSTPSGATGSPGASPGTSSTGSPGTSTPESGSASPGTSPSGESSTAPGTSPSGESSTAPGTSESATPESGPGSEPATSGSETPGTSTEPSEGSAPGSTSESPSGTAPGSTSESPSGTAPGTSTPESGSASPGSPAGSPTSTEEGTSESATPESGPGTSTEPSEGSAPGSPAGSPTSTEEGTSESATPESGPGSEPATSGSETPGSSTPSGATGSPGASPGTSSTGSPGSSTPSGATGSPGSTSESPSGTAPGTSPSGESSTAPGSTSSTAESPGPGSSTPSGATGSPGASPGTSSTGSPGTPGSGTASSSPGSPAGSPTSTEEGSPAGSPTSTEEGTSTEPSEGSAP

SEQ ID NO: 821 - protein, 946 aa, Artificial Sequence
  Description of Artificial Sequence: Synthetic polypeptide
MAEPAGSPTSTEEGTPGSGTASSSPGSSTPSGATGSPGASPGTSSTGSPGSPAGSPTSTEEGTSESATPESGPGTSTEPSEGSAPGSPAGSPTSTEEGTSTEPSEGSAPGTSTEPSEGSAPGTSESATPESGPGSEPATSGSETPGSEPATSGSETPGSPAGSPTSTEEGTSESATPESGPGTSTEPSEGSAPGTSTEPSEGSAPGSPAGSPTSTEEGTSTEPSEGSAPGTSTEPSEGSAPGTSESATPESGPGTSTEPSEGSAPGTSESATPESGPGSEPATSGSETPGTSTEPSEGSAPGTSTEPSEGSAPGTSESATPESGPGTSESATPESGPGSPAGSPTSTEEGTSESATPESGPGSEPATSGSETPGTSESATPESGPGTSTEPSEGSAPGTSTEPSEGSAPGTSTEPSEGSAPGTSTEPSEGSAPGTSTEPSEGSAPGTSTEPSEGSAPGSPAGSPTSTEEGTSTEPSEGSAPGTSESATPESGPGSEPATSGSETPGTSESATPESGPGSEPATSGSETPGTSESATPESGPGTSTEPSEGSAPGTSESATPESGPGSPAGSPTSTEEGSPAGSPTSTEEGSPAGSPTSTEEGTSESATPESGPGTSTEPSEGSAPGTSESATPESGPGSEPATSGSETPGTSESATPESGPGSEPATSGSETPGTSESATPESGPGTSTEPSEGSAPGSPAGSPTSTEEGTSESATPESGPGSEPATSGSETPGTSESATPESGPGSPAGSPTSTEEGSPAGSPTSTEEGTSTEPSEGSAPGTSESATPESGPGTSESATPESGPGTSESATPESGPGSEPATSGSETPGSEPATSGSETPGSPAGSPTSTEEGTSTEPSEGSAPGTSTEPSEGSAPGSEPATSGSETPGTSESATPESGPGTSTEPSEGSAPGCGNLSTCMLGTYTQDFNKFHTFPQTAIGVGAP

SEQ ID NO: 822 - protein, 957 aa, Artificial Sequence
  Description of Artificial Sequence: Synthetic polypeptide
MAEPAGSPTSTEEGASPGTSSTGSPGSSTPSGATGSPGSSTPSGATGSPGTSTEPSEGSAPGSEPATSGSETPGSPAGSPTSTEEGSTSSTAESPGPGTSTPESGSASPGSTSESPSGTAPGSTSESPSGTAPGTSTPESGSASPGTSTPESGSASPGSEPATSGSETPGTSESATPESGPGSPAGSPTSTEEGTSTEPSEGSAPGTSESATPESGPGTSTEPSEGSAPGTSTEPSEGSAPGSPAGSPTSTEEGTSTEPSEGSAPGTSTEPSEGSAPGTSESATPESGPGTSESATPESGPGTSTEPSEGSAPGTSTEPSEGSAPGTSESATPESGPGTSTEPSEGSAPGSEPATSGSETPGSPAGSPTSTEEGSSTPSGATGSPGTPGSGTASSSPGSSTPSGATGSPGTSTEPSEGSAPGTSTEPSEGSAPGSEPATSGSETPGSPAGSPTSTEEGSPAGSPTSTEEGTSTEPSEGSAPGASASGAPSTGGTSESATPESGPGSPAGSPTSTEEGSPAGSPTSTEEGSTSSTAESPGPGSTSESPSGTAPGTSPSGESSTAPGTPGSGTASSSPGSSTPSGATGSPGSSPSASTGTGPGSEPATSGSETPGTSESATPESGPGSEPATSGSETPGSTSSTAESPGPGSTSSTAESPGPGTSPSGESSTAPGSEPATSGSETPGSEPATSGSETPGTSTEPSEGSAPGSTSSTAESPGPGTSTPESGSASPGSTSESPSGTAPGTSTEPSEGSAPGTSTEPSEGSAPGTSTEPSEGSAPGSSTPSGATGSPGSSPSASTGTGPGASPGTSSTGSPGSEPATSGSETPGTSESATPESGPGSPAGSPTSTEEGSSTPSGATGSPGSSPSASTGTGPGASPGTSSTGSPGTSESATPESGPGTSTEPSEGSAPGTSTEPSEGSAPGCGNLSTCMLGTYTQDFNKFHTFPQTAIGVGAP

SEQ ID NO: 823 - protein, 177 aa, Artificial Sequence
  Description of Artificial Sequence: Synthetic polypeptide
GSEPATSGSETPGTSESATPESGPGSEPATSGSETPGSPAGSPTSTEEGTSTEPSEGSAPGSEPATSGSETPGSEPATSGSETPGSEPATSGSETPGTSTEPSEGSAPGTSESATPESGPGSEPATSGSETPGTSTEPSEGSAPGCGNLSTCMLGTYTQDFNKFHTFPQTAIGVGAP

SEQ ID NO: 824 - protein, 321 aa, Artificial Sequence
  Description of Artificial Sequence: Synthetic polypeptide
GTSESATPESGPGSEPATSGSETPGTSESATPESGPGSEPATSGSETPGTSESATPESGPGTSTEPSEGSAPGSPAGSPTSTEEGTSESATPESGPGSEPATSGSETPGTSESATPESGPGSPAGSPTSTEEGSPAGSPTSTEEGTSTEPSEGSAPGTSESATPESGPGTSESATPESGPGTSESATPESGPGSEPATSGSETPGSEPATSGSETPGSPAGSPTSTEEGTSTEPSEGSAPGTSTEPSEGSAPGSEPATSGSETPGTSESATPESGPGTSTEPSEGSAPGCGNLSTCMLGTYTQDFNKFHTFPQTAIGVGAP

SEQ ID NO: 825 - protein, 609 aa, Artificial Sequence
  Description of Artificial Sequence: Synthetic polypeptide
GSPAGSPTSTEEGTSESATPESGPGTSTEPSEGSAPGSPAGSPTSTEEGTSTEPSEGSAPGTSTEPSEGSAPGTSESATPESGPGSEPATSGSETPGSEPATSGSETPGSPAGSPTSTEEGTSESATPESGPGTSTEPSEGSAPGTSTEPSEGSAPGSPAGSPTSTEEGTSTEPSEGSAPGTSTEPSEGSAPGTSESATPESGPGTSTEPSEGSAPGTSESATPESGPGSEPATSGSETPGTSTEPSEGSAPGTSTEPSEGSAPGTSESATPESGPGTSESATPESGPGSPAGSPTSTEEGTSESATPESGPGSEPATSGSETPGTSESATPESGPGTSTEPSEGSAPGTSTEPSEGSAPGTSTEPSEGSAPGTSTEPSEGSAPGTSTEPSEGSAPGTSTEPSEGSAPGSPAGSPTSTEEGTSTEPSEGSAPGTSESATPESGPGSEPATSGSETPGTSESATPESGPGSEPATSGSETPGTSESATPESGPGTSTEPSEGSAPGTSESATPESGPGSPAGSPTSTEEGSPAGSPTSTEEGSPAGSPTSTEEGTSESATPESGPGTSTEPSEGSAPGCGNLSTCMLGTYTQDFNKFHTFPQTAIGVGAP

SEQ ID NO: 826 - protein, 609 aa, Artificial Sequence
  Description of Artificial Sequence: Synthetic polypeptide
GSTSSTAESPGPGSTSSTAESPGPGSTSESPSGTAPGSTSSTAESPGPGSTSSTAESPGPGTSTPESGSASPGSTSESPSGTAPGTSPSGESSTAPGSTSESPSGTAPGSTSESPSGTAPGTSPSGESSTAPGSTSESPSGTAPGSTSESPSGTAPGTSPSGESSTAPGSTSESPSGTAPGSTSESPSGTAPGSTSESPSGTAPGTSTPESGSASPGSTSESPSGTAPGTSTPESGSASPGSTSSTAESPGPGSTSSTAESPGPGTSTPESGSASPGTSTPESGSASPGSTSESPSGTAPGTSTPESGSASPGTSTPESGSASPGSTSESPSGTAPGSTSESPSGTAPGSTSESPSGTAPGSTSSTAESPGPGTSTPESGSASPGTSTPESGSASPGSTSESPSGTAPGSTSESPSGTAPGTSTPESGSASPGSTSESPSGTAPGSTSESPSGTAPGTSTPESGSASPGTSPSGESSTAPGSTSSTAESPGPGTSPSGESSTAPGSTSSTAESPGPGTSTPESGSASPGSTSESPSGTAPGSTSSTAESPGPGTSTPESGSASPGTSTPESGSASPGCGNLSTCMLGTYTQDFNKFHTFPQTAIGVGAP

SEQ ID NO: 827 - protein, 869 aa, Artificial Sequence
  Description of Artificial Sequence: Synthetic polypeptide
GSSESGSSEGGPGSSESGSSEGGPGESPGGSSGSESGSGGEPSESGSSGESPGGSSGSESGESPGGSSGSESGSSESGSSEGGPGSSESGSSEGGPGSSESGSSEGGPGESPGGSSGSESGESPGGSSGSESGESPGGSSGSESGSSESGSSEGGPGSSESGSSEGGPGSSESGSSEGGPGSSESGSSEGGPGSSESGSSEGGPGSSESGSSEGGPGSGGEPSESGSSGESPGGSSGSESGESPGGSSGSESGSGGEPSESGSSGSEGSSGPGESSGSSESGSSEGGPGSGGEPSESGSSGSEGSSGPGESSGSSESGSSEGGPGSGGEPSESGSSGESPGGSSGSESGSGGEPSESGSSGSGGEPSESGSSGSSESGSSEGGPGSGGEPSESGSSGSGGEPSESGSSGSEGSSGPGESSGESPGGSSGSESGSEGSSGPGESSGSEGSSGPGESSGSGGEPSESGSSGSSESGSSEGGPGSSESGSSEGGPGESPGGSSGSESGSGGEPSESGSSGSEGSSGPGESSGESPGGSSGSESGSEGSSGPGSSESGSSEGGPGSGGEPSESGSSGSEGSSGPGESSGSEGSSGPGESSGSEGSSGPGESSGSGGEPSESGSSGSGGEPSESGSSGESPGGSSGSESGESPGGSSGSESGSGGEPSESGSSGSEGSSGPGESSGESPGGSSGSESGSSESGSSEGGPGSSESGSSEGGPGSSESGSSEGGPGSGGEPSESGSSGSSESGSSEGGPGESPGGSSGSESGSGGEPSESGSSGSSESGSSEGGPGESPGGSSGSESGSGGEPSESGSSGESPGGSSGSESGSGGEPSESGSSGCGNLSTCMLGTYTQDFNKFHTFPQTAIGVGAP

SEQ ID NO: 828 - protein, 897 aa, Artificial Sequence
  Description of Artificial Sequence: Synthetic polypeptide
GSPAGSPTSTEEGTSESATPESGPGTSTEPSEGSAPGSPAGSPTSTEEGTSTEPSEGSAPGTSTEPSEGSAPGTSESATPESGPGSEPATSGSETPGSEPATSGSETPGSPAGSPTSTEEGTSESATPESGPGTSTEPSEGSAPGTSTEPSEGSAPGSPAGSPTSTEEGTSTEPSEGSAPGTSTEPSEGSAPGTSESATPESGPGTSTEPSEGSAPGTSESATPESGPGSEPATSGSETPGTSTEPSEGSAPGTSTEPSEGSAPGTSESATPESGPGTSESATPESGPGSPAGSPTSTEEGTSESATPESGPGSEPATSGSETPGTSESATPESGPGTSTEPSEGSAPGTSTEPSEGSAPGTSTEPSEGSAPGTSTEPSEGSAPGTSTEPSEGSAPGTSTEPSEGSAPGSPAGSPTSTEEGTSTEPSEGSAPGTSESATPESGPGSEPATSGSETPGTSESATPESGPGSEPATSGSETPGTSESATPESGPGTSTEPSEGSAPGTSESATPESGPGSPAGSPTSTEEGSPAGSPTSTEEGSPAGSPTSTEEGTSESATPESGPGTSTEPSEGSAPGTSESATPESGPGSEPATSGSETPGTSESATPESGPGSEPATSGSETPGTSESATPESGPGTSTEPSEGSAPGSPAGSPTSTEEGTSESATPESGPGSEPATSGSETPGTSESATPESGPGSPAGSPTSTEEGSPAGSPTSTEEGTSTEPSEGSAPGTSESATPESGPGTSESATPESGPGTSESATPESGPGSEPATSGSETPGSEPATSGSETPGSPAGSPTSTEEGTSTEPSEGSAPGTSTEPSEGSAPGSEPATSGSETPGTSESATPESGPGTSTEPSEGSAPGCGNLSTCMLGTYTQDFNKFHTFPQTAIGVGAP

SEQ ID NO: 829 - protein, 908 aa, Artificial Sequence
  Description of Artificial Sequence: Synthetic polypeptide
  MOD_RES (430)..(432): Any amino acid
  MOD_RES (443)..(446): Any amino acid
GSTSESPSGTAPGTSPSGESSTAPGSTSESPSGTAPGSTSESPSGTAPGTSTPESGSASPGTSTPESGSASPGSTSESPSGTAPGSTSESPSGTAPGTSPSGESSTAPGSTSESPSGTAPGTSPSGESSTAPGTSPSGESSTAPGSTSSTAESPGPGTSPSGESSTAPGTSPSGESSTAPGSTSSTAESPGPGTSTPESGSASPGTSTPESGSASPGSTSESPSGTAPGSTSESPSGTAPGTSTPESGSASPGSTSSTAESPGPGTSTPESGSASPGSTSESPSGTAPGTSPSGESSTAPGSTSSTAESPGPGTSPSGESSTAPGTSTPESGSASPGSTSSTAESPGPGSTSSTAESPGPGSTSSTAESPGPGSTSSTAESPGPGTSPSGESSTAPGSTSESPSGTAPGSTSESPSGTAPGTSTPESGPXXXGASASGAPSTXXXXSESPSGTAPGSTSESPSGTAPGSTSESPSGTAPGSTSESPSGTAPGSTSESPSGTAPGSTSESPSGTAPGTSTPESGSASPGTSPSGESSTAPGTSPSGESSTAPGSTSSTAESPGPGTSPSGESSTAPGTSTPESGSASPGSTSESPSGTAPGSTSESPSGTAPGTSPSGESSTAPGSTSESPSGTAPGTSTPESGSASPGTSTPESGSASPGSTSESPSGTAPGTSTPESGSASPGSTSSTAESPGPGSTSESPSGTAPGSTSESPSGTAPGTSPSGESSTAPGSTSSTAESPGPGTSPSGESSTAPGTSTPESGSASPGTSPSGESSTAPGTSPSGESSTAPGTSPSGESSTAPGSTSSTAESPGPGSTSSTAESPGPGTSPSGESSTAPGSSPSASTGTGPGSSTPSGATGSPGSSTPSGATGSPGCGNLSTCMLGTYTQDFNKFHTFPQTAIGVGAP

SEQ ID NO: 830 - protein, 897 aa, Artificial Sequence
  Description of Artificial Sequence: Synthetic polypeptide
GASPGTSSTGSPGSSPSASTGTGPGSSPSASTGTGPGTPGSGTASSSPGSSTPSGATGSPGSNPSASTGTGPGASPGTSSTGSPGTPGSGTASSSPGSSTPSGATGSPGTPGSGTASSSPGASPGTSSTGSPGASPGTSSTGSPGTPGSGTASSSPGSSTPSGATGSPGASPGTSSTGSPGTPGSGTASSSPGSSTPSGATGSPGSNPSASTGTGPGSSPSASTGTGPGSSTPSGATGSPGSSTPSGATGSPGASPGTSSTGSPGASPGTSSTGSPGASPGTSSTGSPGTPGSGTASSSPGASPGTSSTGSPGASPGTSSTGSPGASPGTSSTGSPGSSPSASTGTGPGTPGSGTASSSPGASPGTSSTGSPGASPGTSSTGSPGASPGTSSTGSPGSSTPSGATGSPGSSTPSGATGSPGASPGTSSTGSPGTPGSGTASSSPGSSTPSGATGSPGSSTPSGATGSPGSSTPSGATGSPGSSPSASTGTGPGASPGTSSTGSPGASPGTSSTGSPGTPGSGTASSSPGASPGTSSTGSPGASPGTSSTGSPGASPGTSSTGSPGASPGTSSTGSPGTPGSGTASSSPGSSTPSGATGSPGTPGSGTASSSPGSSTPSGATGSPGTPGSGTASSSPGSSTPSGATGSPGSSTPSGATGSPGSSPSASTGTGPGSSPSASTGTGPGASPGTSSTGSPGTPGSGTASSSPGSSTPSGATGSPGSSPSASTGTGPGSSPSASTGTGPGASPGTSSTGSPGASPGTSSTGSPGSSTPSGATGSPGSSPSASTGTGPGASPGTSSTGSPGSSPSASTGTGPGTPGSGTASSSPGSSTPSGATGSPGSSTPSGATGSPGASPGTSSTGSPGCGNLSTCMLGTYTQDFNKFHTFPQTAIGVGAP

SEQ ID NO: 831 - protein, 908 aa, Artificial Sequence
  Description of Artificial Sequence: Synthetic polypeptide
GTSTEPSEGSAPGSEPATSGSETPGSPAGSPTSTEEGSTSSTAESPGPGTSTPESGSASPGSTSESPSGTAPGSTSESPSGTAPGTSTPESGSASPGTSTPESGSASPGSEPATSGSETPGTSESATPESGPGSPAGSPTSTEEGTSTEPSEGSAPGTSESATPESGPGTSTEPSEGSAPGTSTEPSEGSAPGSPAGSPTSTEEGTSTEPSEGSAPGTSTEPSEGSAPGTSESATPESGPGTSESATPESGPGTSTEPSEGSAPGTSTEPSEGSAPGTSESATPESGPGTSTEPSEGSAPGSEPATSGSETPGSPAGSPTSTEEGSSTPSGATGSPGTPGSGTASSSPGSSTPSGATGSPGTSTEPSEGSAPGTSTEPSEGSAPGSEPATSGSETPGSPAGSPTSTEEGSPAGSPTSTEEGTSTEPSEGSAPGASASGAPSTGGTSESATPESGPGSPAGSPTSTEEGSPAGSPTSTEEGSTSSTAESPGPGSTSESPSGTAPGTSPSGESSTAPGTPGSGTASSSPGSSTPSGATGSPGSSPSASTGTGPGSEPATSGSETPGTSESATPESGPGSEPATSGSETPGSTSSTAESPGPGSTSSTAESPGPGTSPSGESSTAPGSEPATSGSETPGSEPATSGSETPGTSTEPSEGSAPGSTSSTAESPGPGTSTPESGSASPGSTSESPSGTAPGTSTEPSEGSAPGTSTEPSEGSAPGTSTEPSEGSAPGSSTPSGATGSPGSSPSASTGTGPGASPGTSSTGSPGSEPATSGSETPGTSESATPESGPGSPAGSPTSTEEGSSTPSGATGSPGSSPSASTGTGPGASPGTSSTGSPGTSESATPESGPGTSTEPSEGSAPGTSTEPSEGSAPGCGNLSTCMLGTYTQDFNKFHTFPQTAIGVGAP

SEQ ID NO: 832 - protein, 1351 aa, Artificial Sequence
  Description of Artificial Sequence: Synthetic polypeptide
GTSTEPSEGSAPGSEPATSGSETPGSPAGSPTSTEEGSTSSTAESPGPGTSTPESGSASPGSTSESPSGTAPGSTSESPSGTAPGTSTPESGSASPGTSTPESGSASPGSEPATSGSETPGTSESATPESGPGSPAGSPTSTEEGTSTEPSEGSAPGTSESATPESGPGTSTEPSEGSAPGTSTEPSEGSAPGSPAGSPTSTEEGTSTEPSEGSAPGTSTEPSEGSAPGTSESATPESGPGTSESATPESGPGTSTEPSEGSAPGTSTEPSEGSAPGTSESATPESGPGTSTEPSEGSAPGSEPATSGSETPGSPAGSPTSTEEGSSTPSGATGSPGTPGSGTASSSPGSSTPSGATGSPGTSTEPSEGSAPGTSTEPSEGSAPGSEPATSGSETPGSPAGSPTSTEEGSPAGSPTSTEEGTSTEPSEGSAPGPEPTGPAPSGGSEPATSGSETPGTSESATPESGPGSPAGSPTSTEEGTSESATPESGPGSPAGSPTSTEEGSPAGSPTSTEEGTSESATPESGPGSPAGSPTSTEEGSPAGSPTSTEEGSTSSTAESPGPGSTSESPSGTAPGTSPSGESSTAPGSTSESPSGTAPGSTSESPSGTAPGTSPSGESSTAPGTSTEPSEGSAPGTSESATPESGPGTSESATPESGPGSEPATSGSETPGTSESATPESGPGTSESATPESGPGTSTEPSEGSAPGTSESATPESGPGTSTEPSEGSAPGTSPSGESSTAPGTSPSGESSTAPGTSPSGESSTAPGTSTEPSEGSAPGSPAGSPTSTEEGTSTEPSEGSAPGSSPSASTGTGPGSSTPSGATGSPGSSTPSGATGSPGSSTPSGATGSPGSSTPSGATGSPGASPGTSSTGSPGASASGAPSTGGTSPSGESSTAPGSTSSTAESPGPGTSPSGESSTAPGTSESATPESGPGTSTEPSEGSAPGTSTEPSEGSAPGSSPSASTGTGPGSSTPSGATGSPGASPGTSSTGSPGTSTPESGSASPGTSPSGESSTAPGTSPSGESSTAPGTSESATPESGPGSEPATSGSETPGTSTEPSEGSAPGSTSESPSGTAPGSTSESPSGTAPGTSTPESGSASPGSPAGSPTSTEEGTSESATPESGPGTSTEPSEGSAPGSPAGSPTSTEEGTSESATPESGPGSEPATSGSETPGSSTPSGATGSPGASPGTSSTGSPGSSTPSGATGSPGSTSESPSGTAPGTSPSGESSTAPGSTSSTAESPGPGSSTPSGATGSPGASPGTSSTGSPGTPGSGTASSSPGSPAGSPTSTEEGSPAGSPTSTEEGTSTEPSEGSAPGCGNLSTCMLGTYTQDFNKFHTFPQTAIGVGAP

SEQ ID NO: 833 - protein, 181 aa, Artificial Sequence
  Description of Artificial Sequence: Synthetic polypeptide
ACDTATCVTHRLAGLLSRSGGVVKNMVPTNVGSKAFGGSEPATSGSETPGTSESATPESGPGSEPATSGSETPGSPAGSPTSTEEGTSTEPSEGSAPGSEPATSGSETPGSEPATSGSETPGSEPATSGSETPGTSTEPSEGSAPGTSESATPESGPGSEPATSGSETPGTSTEPSEGSAP

SEQ ID NO: 834 - protein, 325 aa, Artificial Sequence
  Description of Artificial Sequence: Synthetic polypeptide
ACDTATCVTHRLAGLLSRSGGVVKNMVPTNVGSKAFGGTSESATPESGPGSEPATSGSETPGTSESATPESGPGSEPATSGSETPGTSESATPESGPGTSTEPSEGSAPGSPAGSPTSTEEGTSESATPESGPGSEPATSGSETPGTSESATPESGPGSPAGSPTSTEEGSPAGSPTSTEEGTSTEPSEGSAPGTSESATPESGPGTSESATPESGPGTSESATPESGPGSEPATSGSETPGSEPATSGSETPGSPAGSPTSTEEGTSTEPSEGSAPGTSTEPSEGSAPGSEPATSGSETPGTSESATPESGPGTSTEPSEGSAP

SEQ ID NO: 835 - protein, 613 aa, Artificial Sequence
  Description of Artificial Sequence: Synthetic polypeptide
ACDTATCVTHRLAGLLSRSGGVVKNMVPTNVGSKAFGGSPAGSPTSTEEGTSESATPESGPGTSTEPSEGSAPGSPAGSPTSTEEGTSTEPSEGSAPGTSTEPSEGSAPGTSESATPESGPGSEPATSGSETPGSEPATSGSETPGSPAGSPTSTEEGTSESATPESGPGTSTEPSEGSAPGTSTEPSEGSAPGSPAGSPTSTEEGTSTEPSEGSAPGTSTEPSEGSAPGTSESATPESGPGTSTEPSEGSAPGTSESATPESGPGSEPATSGSETPGTSTEPSEGSAPGTSTEPSEGSAPGTSESATPESGPGTSESATPESGPGSPAGSPTSTEEGTSESATPESGPGSEPATSGSETPGTSESATPESGPGTSTEPSEGSAPGTSTEPSEGSAPGTSTEPSEGSAPGTSTEPSEGSAPGTSTEPSEGSAPGTSTEPSEGSAPGSPAGSPTSTEEGTSTEPSEGSAPGTSESATPESGPGSEPATSGSETPGTSESATPESGPGSEPATSGSETPGTSESATPESGPGTSTEPSEGSAPGTSESATPESGPGSPAGSPTSTEEGSPAGSPTSTEEGSPAGSPTSTEEGTSESATPESGPGTSTEPSEGSAP

SEQ ID NO: 836 - protein, 613 aa, Artificial Sequence
  Description of Artificial Sequence: Synthetic polypeptide
ACDTATCVTHRLAGLLSRSGGVVKNMVPTNVGSKAFGGSTSSTAESPGPGSTSSTAESPGPGSTSESPSGTAPGSTSSTAESPGPGSTSSTAESPGPGTSTPESGSASPGSTSESPSGTAPGTSPSGESSTAPGSTSESPSGTAPGSTSESPSGTAPGTSPSGESSTAPGSTSESPSGTAPGSTSESPSGTAPGTSPSGESSTAPGSTSESPSGTAPGSTSESPSGTAPGSTSESPSGTAPGTSTPESGSASPGSTSESPSGTAPGTSTPESGSASPGSTSSTAESPGPGSTSSTAESPGPGTSTPESGSASPGTSTPESGSASPGSTSESPSGTAPGTSTPESGSASPGTSTPESGSASPGSTSESPSGTAPGSTSESPSGTAPGSTSESPSGTAPGSTSSTAESPGPGTSTPESGSASPGTSTPESGSASPGSTSESPSGTAPGSTSESPSGTAPGTSTPESGSASPGSTSESPSGTAPGSTSESPSGTAPGTSTPESGSASPGTSPSGESSTAPGSTSSTAESPGPGTSPSGESSTAPGSTSSTAESPGPGTSTPESGSASPGSTSESPSGTAPGSTSSTAESPGPGTSTPESGSASPGTSTPESGSASP

SEQ ID NO: 837 - protein, 873 aa, Artificial Sequence
  Description of Artificial Sequence: Synthetic polypeptide
ACDTATCVTHRLAGLLSRSGGVVKNMVPTNVGSKAFGGSSESGSSEGGPGSSESGSSEGGPGESPGGSSGSESGSGGEPSESGSSGESPGGSSGSESGESPGGSSGSESGSSESGSSEGGPGSSESGSSEGGPGSSESGSSEGGPGESPGGSSGSESGESPGGSSGSESGESPGGSSGSESGSSESGSSEGGPGSSESGSSEGGPGSSESGSSEGGPGSSESGSSEGGPGSSESGSSEGGPGSSESGSSEGGPGSGGEPSESGSSGESPGGSSGSESGESPGGSSGSESGSGGEPSESGSSGSEGSSGPGESSGSSESGSSEGGPGSGGEPSESGSSGSEGSSGPGESSGSSESGSSEGGPGSGGEPSESGSSGESPGGSSGSESGSGGEPSESGSSGSGGEPSESGSSGSSESGSSEGGPGSGGEPSESGSSGSGGEPSESGSSGSEGSSGPGESSGESPGGSSGSESGSEGSSGPGESSGSEGSSGPGESSGSGGEPSESGSSGSSESGSSEGGPGSSESGSSEGGPGESPGGSSGSESGSGGEPSESGSSGSEGSSGPGESSGESPGGSSGSESGSEGSSGPGSSESGSSEGGPGSGGEPSESGSSGSEGSSGPGESSGSEGSSGPGESSGSEGSSGPGESSGSGGEPSESGSSGSGGEPSESGSSGESPGGSSGSESGESPGGSSGSESGSGGEPSESGSSGSEGSSGPGESSGESPGGSSGSESGSSESGSSEGGPGSSESGSSEGGPGSSESGSSEGGPGSGGEPSESGSSGSSESGSSEGGPGESPGGSSGSESGSGGEPSESGSSGSSESGSSEGGPGESPGGSSGSESGSGGEPSESGSSGESPGGSSGSESGSGGEPSESGSS

SEQ ID NO: 838 - protein, 901 aa, Artificial Sequence
  Description of Artificial Sequence: Synthetic polypeptide
ACDTATCVTHRLAGLLSRSGGVVKNMVPTNVGSKAFGGSPAGSPTSTEEGTSESATPESGPGTSTEPSEGSAPGSPAGSPTSTEEGTSTEPSEGSAPGTSTEPSEGSAPGTSESATPESGPGSEPATSGSETPGSEPATSGSETPGSPAGSPTSTEEGTSESATPESGPGTSTEPSEGSAPGTSTEPSEGSAPGSPAGSPTSTEEGTSTEPSEGSAPGTSTEPSEGSAPGTSESATPESGPGTSTEPSEGSAPGTSESATPESGPGSEPATSGSETPGTSTEPSEGSAPGTSTEPSEGSAPGTSESATPESGPGTSESATPESGPGSPAGSPTSTEEGTSESATPESGPGSEPATSGSETPGTSESATPESGPGTSTEPSEGSAPGTSTEPSEGSAPGTSTEPSEGSAPGTSTEPSEGSAPGTSTEPSEGSAPGTSTEPSEGSAPGSPAGSPTSTEEGTSTEPSEGSAPGTSESATPESGPGSEPATSGSETPGTSESATPESGPGSEPATSGSETPGTSESATPESGPGTSTEPSEGSAPGTSESATPESGPGSPAGSPTSTEEGSPAGSPTSTEEGSPAGSPTSTEEGTSESATPESGPGTSTEPSEGSAPGTSESATPESGPGSEPATSGSETPGTSESATPESGPGSEPATSGSETPGTSESATPESGPGTSTEPSEGSAPGSPAGSPTSTEEGTSESATPESGPGSEPATSGSETPGTSESATPESGPGSPAGSPTSTEEGSPAGSPTSTEEGTSTEPSEGSAPGTSESATPESGPGTSESATPESGPGTSESATPESGPGSEPATSGSETPGSEPATSGSETPGSPAGSPTSTEEGTSTEPSEGSAPGTSTEPSEGSAPGSEPATSGSETPGTSESATPESGPGTSTEPSEGSAP

SEQ ID NO: 839 - protein, 912 aa, Artificial Sequence
  Description of Artificial Sequence: Synthetic polypeptide
  MOD_RES (467)..(469): Any amino acid
  MOD_RES (480)..(483): Any amino acid
ACDTATCVTHRLAGLLSRSGGVVKNMVPTNVGSKAFGGSTSESPSGTAPGTSPSGESSTAPGSTSESPSGTAPGSTSESPSGTAPGTSTPESGSASPGTSTPESGSASPGSTSESPSGTAPGSTSESPSGTAPGTSPSGESSTAPGSTSESPSGTAPGTSPSGESSTAPGTSPSGESSTAPGSTSSTAESPGPGTSPSGESSTAPGTSPSGESSTAPGSTSSTAESPGPGTSTPESGSASPGTSTPESGSASPGSTSESPSGTAPGSTSESPSGTAPGTSTPESGSASPGSTSSTAESPGPGTSTPESGSASPGSTSESPSGTAPGTSPSGESSTAPGSTSSTAESPGPGTSPSGESSTAPGTSTPESGSASPGSTSSTAESPGPGSTSSTAESPGPGSTSSTAESPGPGSTSSTAESPGPGTSPSGESSTAPGSTSESPSGTAPGSTSESPSGTAPGTSTPESGPXXXGASASGAPSTXXXXSESPSGTAPGSTSESPSGTAPGSTSESPSGTAPGSTSESPSGTAPGSTSESPSGTAPGSTSESPSGTAPGTSTPESGSASPGTSPSGESSTAPGTSPSGESSTAPGSTSSTAESPGPGTSPSGESSTAPGTSTPESGSASPGSTSESPSGTAPGSTSESPSGTAPGTSPSGESSTAPGSTSESPSGTAPGTSTPESGSASPGTSTPESGSASPGSTSESPSGTAPGTSTPESGSASPGSTSSTAESPGPGSTSESPSGTAPGSTSESPSGTAPGTSPSGESSTAPGSTSSTAESPGPGTSPSGESSTAPGTSTPESGSASPGTSPSGESSTAPGTSPSGESSTAPGTSPSGESSTAPGSTSSTAESPGPGSTSSTAESPGPGTSPSGESSTAPGSSPSASTGTGPGSSTPSGATGSPGSSTPSGATGSP

SEQ ID NO: 840 - protein, 901 aa, Artificial Sequence
  Description of Artificial Sequence: Synthetic polypeptide
ACDTATCVTHRLAGLLSRSGGVVKNMVPTNVGSKAFGGASPGTSSTGSPGSSPSASTGTGPGSSPSASTGTGPGTPGSGTASSSPGSSTPSGATGSPGSNPSASTGTGPGASPGTSSTGSPGTPGSGTASSSPGSSTPSGATGSPGTPGSGTASSSPGASPGTSSTGSPGASPGTSSTGSPGTPGSGTASSSPGSSTPSGATGSPGASPGTSSTGSPGTPGSGTASSSPGSSTPSGATGSPGSNPSASTGTGPGSSPSASTGTGPGSSTPSGATGSPGSSTPSGATGSPGASPGTSSTGSPGASPGTSSTGSPGASPGTSSTGSPGTPGSGTASSSPGASPGTSSTGSPGASPGTSSTGSPGASPGTSSTGSPGSSPSASTGTGPGTPGSGTASSSPGASPGTSSTGSPGASPGTSSTGSPGASPGTSSTGSPGSSTPSGATGSPGSSTPSGATGSPGASPGTSSTGSPGTPGSGTASSSPGSSTPSGATGSPGSSTPSGATGSPGSSTPSGATGSPGSSPSASTGTGPGASPGTSSTGSPGASPGTSSTGSPGTPGSGTASSSPGASPGTSSTGSPGASPGTSSTGSPGASPGTSSTGSPGASPGTSSTGSPGTPGSGTASSSPGSSTPSGATGSPGTPGSGTASSSPGSSTPSGATGSPGTPGSGTASSSPGSSTPSGATGSPGSSTPSGATGSPGSSPSASTGTGPGSSPSASTGTGPGASPGTSSTGSPGTPGSGTASSSPGSSTPSGATGSPGSSPSASTGTGPGSSPSASTGTGPGASPGTSSTGSPGASPGTSSTGSPGSSTPSGATGSPGSSPSASTGTGPGASPGTSSTGSPGSSPSASTGTGPGTPGSGTASSSPGSSTPSGATGSPGSSTPSGATGSPGASPGTSSTGSP

SEQ ID NO: 841 - protein, 912 aa, Artificial Sequence
  Description of Artificial Sequence: Synthetic polypeptide
ACDTATCVTHRLAGLLSRSGGVVKNMVPTNVGSKAFGGTSTEPSEGSAPGSEPATSGSETPGSPAGSPTSTEEGSTSSTAESPGPGTSTPESGSASPGSTSESPSGTAPGSTSESPSGTAPGTSTPESGSASPGTSTPESGSASPGSEPATSGSETPGTSESATPESGPGSPAGSPTSTEEGTSTEPSEGSAPGTSESATPESGPGTSTEPSEGSAPGTSTEPSEGSAPGSPAGSPTSTEEGTSTEPSEGSAPGTSTEPSEGSAPGTSESATPESGPGTSESATPESGPGTSTEPSEGSAPGTSTEPSEGSAPGTSESATPESGPGTSTEPSEGSAPGSEPATSGSETPGSPAGSPTSTEEGSSTPSGATGSPGTPGSGTASSSPGSSTPSGATGSPGTSTEPSEGSAPGTSTEPSEGSAPGSEPATSGSETPGSPAGSPTSTEEGSPAGSPTSTEEGTSTEPSEGSAPGASASGAPSTGGTSESATPESGPGSPAGSPTSTEEGSPAGSPTSTEEGSTSSTAESPGPGSTSESPSGTAPGTSPSGESSTAPGTPGSGTASSSPGSSTPSGATGSPGSSPSASTGTGPGSEPATSGSETPGTSESATPESGPGSEPATSGSETPGSTSSTAESPGPGSTSSTAESPGPGTSPSGESSTAPGSEPATSGSETPGSEPATSGSETPGTSTEPSEGSAPGSTSSTAESPGPGTSTPESGSASPGSTSESPSGTAPGTSTEPSEGSAPGTSTEPSEGSAPGTSTEPSEGSAPGSSTPSGATGSPGSSPSASTGTGPGASPGTSSTGSPGSEPATSGSETPGTSESATPESGPGSPAGSPTSTEEGSSTPSGATGSPGSSPSASTGTGPGASPGTSSTGSPGTSESATPESGPGTSTEPSEGSAPGTSTEPSEGSAP

SEQ ID NO: 842 - protein, 950 aa, Artificial Sequence
  Description of Artificial Sequence: Synthetic polypeptide
MAEPAGSPTSTEEGTPGSGTASSSPGSSTPSGATGSPGASPGTSSTGSPGSPAGSPTSTEEGTSESATPESGPGTSTEPSEGSAPGSPAGSPTSTEEGTSTEPSEGSAPGTSTEPSEGSAPGTSESATPESGPGSEPATSGSETPGSEPATSGSETPGSPAGSPTSTEEGTSESATPESGPGTSTEPSEGSAPGTSTEPSEGSAPGSPAGSPTSTEEGTSTEPSEGSAPGTSTEPSEGSAPGTSESATPESGPGTSTEPSEGSAPGTSESATPESGPGSEPATSGSETPGTSTEPSEGSAPGTSTEPSEGSAPGTSESATPESGPGTSESATPESGPGSPAGSPTSTEEGTSESATPESGPGSEPATSGSETPGTSESATPESGPGTSTEPSEGSAPGTSTEPSEGSAPGTSTEPSEGSAPGTSTEPSEGSAPGTSTEPSEGSAPGTSTEPSEGSAPGSPAGSPTSTEEGTSTEPSEGSAPGTSESATPESGPGSEPATSGSETPGTSESATPESGPGSEPATSGSETPGTSESATPESGPGTSTEPSEGSAPGTSESATPESGPGSPAGSPTSTEEGSPAGSPTSTEEGSPAGSPTSTEEGTSESATPESGPGTSTEPSEGSAPGTSESATPESGPGSEPATSGSETPGTSESATPESGPGSEPATSGSETPGTSESATPESGPGTSTEPSEGSAPGSPAGSPTSTEEGTSESATPESGPGSEPATSGSETPGTSESATPESGPGSPAGSPTSTEEGSPAGSPTSTEEGTSTEPSEGSAPGTSESATPESGPGTSESATPESGPGTSESATPESGPGSEPATSGSETPGSEPATSGSETPGSPAGSPTSTEEGTSTEPSEGSAPGTSTEPSEGSAPGSEPATSGSETPGTSESATPESGPGTSTEPSEGSAPGACDTATCVTHRLAGLLSRSGGVVKNMVPTNVGSKAF

SEQ ID NO: 843 - protein, 961 aa, Artificial Sequence
  Description of Artificial Sequence: Synthetic polypeptide
MAEPAGSPTSTEEGASPGTSSTGSPGSSTPSGATGSPGSSTPSGATGSPGTSTEPSEGSAPGSEPATSGSETPGSPAGSPTSTEEGSTSSTAESPGPGTSTPESGSASPGSTSESPSGTAPGSTSESPSGTAPGTSTPESGSASPGTSTPESGSASPGSEPATSGSETPGTSESATPESGPGSPAGSPTSTEEGTSTEPSEGSAPGTSESATPESGPGTSTEPSEGSAPGTSTEPSEGSAPGSPAGSPTSTEEGTSTEPSEGSAPGTSTEPSEGSAPGTSESATPESGPGTSESATPESGPGTSTEPSEGSAPGTSTEPSEGSAPGTSESATPESGPGTSTEPSEGSAPGSEPATSGSETPGSPAGSPTSTEEGSSTPSGATGSPGTPGSGTASSSPGSSTPSGATGSPGTSTEPSEGSAPGTSTEPSEGSAPGSEPATSGSETPGSPAGSPTSTEEGSPAGSPTSTEEGTSTEPSEGSAPGASASGAPSTGGTSESATPESGPGSPAGSPTSTEEGSPAGSPTSTEEGSTSSTAESPGPGSTSESPSGTAPGTSPSGESSTAPGTPGSGTASSSPGSSTPSGATGSPGSSPSASTGTGPGSEPATSGSETPGTSESATPESGPGSEPATSGSETPGSTSSTAESPGPGSTSSTAESPGPGTSPSGESSTAPGSEPATSGSETPGSEPATSGSETPGTSTEPSEGSAPGSTSSTAESPGPGTSTPESGSASPGSTSESPSGTAPGTSTEPSEGSAPGTSTEPSEGSAPGTSTEPSEGSAPGSSTPSGATGSPGSSPSASTGTGPGASPGTSSTGSPGSEPATSGSETPGTSESATPESGPGSPAGSPTSTEEGSSTPSGATGSPGSSPSASTGTGPGASPGTSSTGSPGTSESATPESGPGTSTEPSEGSAPGTSTEPSEGSAPGACDTATCVTHRLAGLLSRSGGVVKNMVPTNVGSKAF

SEQ ID NO: 844 - protein, 181 aa, Artificial Sequence
  Description of Artificial Sequence: Synthetic polypeptide
GSEPATSGSETPGTSESATPESGPGSEPATSGSETPGSPAGSPTSTEEGTSTEPSEGSAPGSEPATSGSETPGSEPATSGSETPGSEPATSGSETPGTSTEPSEGSAPGTSESATPESGPGSEPATSGSETPGTSTEPSEGSAPGACDTATCVTHRLAGLLSRSGGVVKNMVPTNVGSKAF

SEQ ID NO: 845 - protein, 181 aa, Artificial Sequence
  Description of Artificial Sequence: Synthetic polypeptide
GTSTPESGSASPGTSPSGESSTAPGTSPSGESSTAPGSTSSTAESPGPGSTSESPSGTAPGSTSSTAESPGPGTSPSGESSTAPGTSTPESGSASPGSTSSTAESPGPGTSPSGESSTAPGTSPSGESSTAPGTSPSGESSTAPGACDTATCVTHRLAGLLSRSGGVVKNMVPTNVGSKAF

SEQ ID NO: 846 - protein, 325 aa, Artificial Sequence
  Description of Artificial Sequence: Synthetic polypeptide
GTSESATPESGPGSEPATSGSETPGTSESATPESGPGSEPATSGSETPGTSESATPESGPGTSTEPSEGSAPGSPAGSPTSTEEGTSESATPESGPGSEPATSGSETPGTSESATPESGPGSPAGSPTSTEEGSPAGSPTSTEEGTSTEPSEGSAPGTSESATPESGPGTSESATPESGPGTSESATPESGPGSEPATSGSETPGSEPATSGSETPGSPAGSPTSTEEGTSTEPSEGSAPGTSTEPSEGSAPGSEPATSGSETPGTSESATPESGPGTSTEPSEGSAPGACDTATCVTHRLAGLLSRSGGVVKNMVPTNVGSKAF

SEQ ID NO: 847 - protein, 613 aa, Artificial Sequence
  Description of Artificial Sequence: Synthetic polypeptide
GSPAGSPTSTEEGTSESATPESGPGTSTEPSEGSAPGSPAGSPTSTEEGTSTEPSEGSAPGTSTEPSEGSAPGTSESATPESGPGSEPATSGSETPGSEPATSGSETPGSPAGSPTSTEEGTSESATPESGPGTSTEPSEGSAPGTSTEPSEGSAPGSPAGSPTSTEEGTSTEPSEGSAPGTSTEPSEGSAPGTSESATPESGPGTSTEPSEGSAPGTSESATPESGPGSEPATSGSETPGTSTEPSEGSAPGTSTEPSEGSAPGTSESATPESGPGTSESATPESGPGSPAGSPTSTEEGTSESATPESGPGSEPATSGSETPGTSESATPESGPGTSTEPSEGSAPGTSTEPSEGSAPGTSTEPSEGSAPGTSTEPSEGSAPGTSTEPSEGSAPGTSTEPSEGSAPGSPAGSPTSTEEGTSTEPSEGSAPGTSESATPESGPGSEPATSGSETPGTSESATPESGPGSEPATSGSETPGTSESATPESGPGTSTEPSEGSAPGTSESATPESGPGSPAGSPTSTEEGSPAGSPTSTEEGSPAGSPTSTEEGTSESATPESGPGTSTEPSEGSAPGACDTATCVTHRLAGLLSRSGGVVKNMVPTNVGSKAF

SEQ ID NO: 848 - protein, 613 aa, Artificial Sequence
  Description of Artificial Sequence: Synthetic polypeptide
GSTSSTAESPGPGSTSSTAESPGPGSTSESPSGTAPGSTSSTAESPGPGSTSSTAESPGPGTSTPESGSASPGSTSESPSGTAPGTSPSGESSTAPGSTSESPSGTAPGSTSESPSGTAPGTSPSGESSTAPGSTSESPSGTAPGSTSESPSGTAPGTSPSGESSTAPGSTSESPSGTAPGSTSESPSGTAPGSTSESPSGTAPGTSTPESGSASPGSTSESPSGTAPGTSTPESGSASPGSTSSTAESPGPGSTSSTAESPGPGTSTPESGSASPGTSTPESGSASPGSTSESPSGTAPGTSTPESGSASPGTSTPESGSASPGSTSESPSGTAPGSTSESPSGTAPGSTSESPSGTAPGSTSSTAESPGPGTSTPESGSASPGTSTPESGSASPGSTSESPSGTAPGSTSESPSGTAPGTSTPESGSASPGSTSESPSGTAPGSTSESPSGTAPGTSTPESGSASPGTSPSGESSTAPGSTSSTAESPGPGTSPSGESSTAPGSTSSTAESPGPGTSTPESGSASPGSTSESPSGTAPGSTSSTAESPGPGTSTPESGSASPGTSTPESGSASPGACDTATCVTHRLAGLLSRSGGVVKNMVPTNVGSKAF

SEQ ID NO: 849 - protein, 873 aa, Artificial Sequence
  Description of Artificial Sequence: Synthetic polypeptide
GSSESGSSEGGPGSSESGSSEGGPGESPGGSSGSESGSGGEPSESGSSGESPGGSSGSESGESPGGSSGSESGSSESGSSEGGPGSSESGSSEGGPGSSESGSSEGGPGESPGGSSGSESGESPGGSSGSESGESPGGSSGSESGSSESGSSEGGPGSSESGSSEGGPGSSESGSSEGGPGSSESGSSEGGPGSSESGSSEGGPGSSESGSSEGGPGSGGEPSESGSSGESPGGSSGSESGESPGGSSGSESGSGGEPSESGSSGSEGSSGPGESSGSSESGSSEGGPGSGGEPSESGSSGSEGSSGPGESSGSSESGSSEGGPGSGGEPSESGSSGESPGGSSGSESGSGGEPSESGSSGSGGEPSESGSSGSSESGSSEGGPGSGGEPSESGSSGSGGEPSESGSSGSEGSSGPGESSGESPGGSSGSESGSEGSSGPGESSGSEGSSGPGESSGSGGEPSESGSSGSSESGSSEGGPGSSESGSSEGGPGESPGGSSGSESGSGGEPSESGSSGSEGSSGPGESSGESPGGSSGSESGSEGSSGPGSSESGSSEGGPGSGGEPSESGSSGSEGSSGPGESSGSEGSSGPGESSGSEGSSGPGESSGSGGEPSESGSSGSGGEPSESGSSGESPGGSSGSESGESPGGSSGSESGSGGEPSESGSSGSEGSSGPGESSGESPGGSSGSESGSSESGSSEGGPGSSESGSSEGGPGSSESGSSEGGPGSGGEPSESGSSGSSESGSSEGGPGESPGGSSGSESGSGGEPSESGSSGSSESGSSEGGPGESPGGSSGSESGSGGEPSESGSSGESPGGSSGSESGSGGEPSESGSSGACDTATCVTHRLAGLLSRSGGVVKNMVPTNVGSKAF

SEQ ID NO: 850 - protein, 901 aa, Artificial Sequence
  Description of Artificial Sequence: Synthetic polypeptide
GSPAGSPTSTEEGTSESATPESGPGTSTEPSEGSAPGSPAGSPTSTEEGTSTEPSEGSAPGTSTEPSEGSAPGTSESATPESGPGSEPATSGSETPGSEPATSGSETPGSPAGSPTSTEEGTSESATPESGPGTSTEPSEGSAPGTSTEPSEGSAPGSPAGSPTSTEEGTSTEPSEGSAPGTSTEPSEGSAPGTSESATPESGPGTSTEPSEGSAPGTSESATPESGPGSEPATSGSETPGTSTEPSEGSAPGTSTEPSEGSAPGTSESATPESGPGTSESATPESGPGSPAGSPTSTEEGTSESATPESGPGSEPATSGSETPGTSESATPESGPGTSTEPSEGSAPGTSTEPSEGSAPGTSTEPSEGSAPGTSTEPSEGSAPGTSTEPSEGSAPGTSTEPSEGSAPGSPAGSPTSTEEGTSTEPSEGSAPGTSESATPESGPGSEPATSGSETPGTSESATPESGPGSEPATSGSETPGTSESATPESGPGTSTEPSEGSAPGTSESATPESGPGSPAGSPTSTEEGSPAGSPTSTEEGSPAGSPTSTEEGTSESATPESGPGTSTEPSEGSAPGTSESATPESGPGSEPATSGSETPGTSESATPESGPGSEPATSGSETPGTSESATPESGPGTSTEPSEGSAPGSPAGSPTSTEEGTSESATPESGPGSEPATSGSETPGTSESATPESGPGSPAGSPTSTEEGSPAGSPTSTEEGTSTEPSEGSAPGTSESATPESGPGTSESATPESGPGTSESATPESGPGSEPATSGSETPGSEPATSGSETPGSPAGSPTSTEEGTSTEPSEGSAPGTSTEPSEGSAPGSEPATSGSETPGTSESATPESGPGTSTEPSEGSAPGACDTATCVTHRLAGLLSRSGGVVKNMVPTNVGSKAF

SEQ ID NO: 851 - protein, 912 aa, Artificial Sequence
  Description of Artificial Sequence: Synthetic polypeptide
  MOD_RES (430)..(432): Any amino acid
  MOD_RES (443)..(446): Any amino acid
GSTSESPSGTAPGTSPSGESSTAPGSTSESPSGTAPGSTSESPSGTAPGTSTPESGSASPGTSTPESGSASPGSTSESPSGTAPGSTSESPSGTAPGTSPSGESSTAPGSTSESPSGTAPGTSPSGESSTAPGTSPSGESSTAPGSTSSTAESPGPGTSPSGESSTAPGTSPSGESSTAPGSTSSTAESPGPGTSTPESGSASPGTSTPESGSASPGSTSESPSGTAPGSTSESPSGTAPGTSTPESGSASPGSTSSTAESPGPGTSTPESGSASPGSTSESPSGTAPGTSPSGESSTAPGSTSSTAESPGPGTSPSGESSTAPGTSTPESGSASPGSTSSTAESPGPGSTSSTAESPGPGSTSSTAESPGPGSTSSTAESPGPGTSPSGESSTAPGSTSESPSGTAPGSTSESPSGTAPGTSTPESGPXXXGASASGAPSTXXXXSESPSGTAPGSTSESPSGTAPGSTSESPSGTAPGSTSESPSGTAPGSTSESPSGTAPGSTSESPSGTAPGTSTPESGSASPGTSPSGESSTAPGTSPSGESSTAPGSTSSTAESPGPGTSPSGESSTAPGTSTPESGSASPGSTSESPSGTAPGSTSESPSGTAPGTSPSGESSTAPGSTSESPSGTAPGTSTPESGSASPGTSTPESGSASPGSTSESPSGTAPGTSTPESGSASPGSTSSTAESPGPGSTSESPSGTAPGSTSESPSGTAPGTSPSGESSTAPGSTSSTAESPGPGTSPSGESSTAPGTSTPESGSASPGTSPSGESSTAPGTSPSGESSTAPGTSPSGESSTAPGSTSSTAESPGPGSTSSTAESPGPGTSPSGESSTAPGSSPSASTGTGPGSSTPSGATGSPGSSTPSGATGSPGACDTATCVTHRLAGLLSRSGGVVKNMVPTNVGSKAF

SEQ ID NO: 852 - protein, 901 aa, Artificial Sequence
  Description of Artificial Sequence: Synthetic polypeptide
GASPGTSSTGSPGSSPSASTGTGPGSSPSASTGTGPGTPGSGTASSSPGSSTPSGATGSPGSNPSASTGTGPGASPGTSSTGSPGTPGSGTASSSPGSSTPSGATGSPGTPGSGTASSSPGASPGTSSTGSPGASPGTSSTGSPGTPGSGTASSSPGSSTPSGATGSPGASPGTSSTGSPGTPGSGTASSSPGSSTPSGATGSPGSNPSASTGTGPGSSPSASTGTGPGSSTPSGATGSPGSSTPSGATGSPGASPGTSSTGSPGASPGTSSTGSPGASPGTSSTGSPGTPGSGTASSSPGASPGTSSTGSPGASPGTSSTGSPGASPGTSSTGSPGSSPSASTGTGPGTPGSGTASSSPGASPGTSSTGSPGASPGTSSTGSPGASPGTSSTGSPGSSTPSGATGSPGSSTPSGATGSPGASPGTSSTGSPGTPGSGTASSSPGSSTPSGATGSPGSSTPSGATGSPGSSTPSGATGSPGSSPSASTGTGPGASPGTSSTGSPGASPGTSSTGSPGTPGSGTASSSPGASPGTSSTGSPGASPGTSSTGSPGASPGTSSTGSPGASPGTSSTGSPGTPGSGTASSSPGSSTPSGATGSPGTPGSGTASSSPGSSTPSGATGSPGTPGSGTASSSPGSSTPSGATGSPGSSTPSGATGSPGSSPSASTGTGPGSSPSASTGTGPGASPGTSSTGSPGTPGSGTASSSPGSSTPSGATGSPGSSPSASTGTGPGSSPSASTGTGPGASPGTSSTGSPGASPGTSSTGSPGSSTPSGATGSPGSSPSASTGTGPGASPGTSSTGSPGSSPSASTGTGPGTPGSGTASSSPGSSTPSGATGSPGSSTPSGATGSPGASPGTSSTGSPGACDTATCVTHRLAGLLSRSGGVVKNMVPTNVGSKAF

SEQ ID NO: 853 - protein, 912 aa, Artificial Sequence
  Description of Artificial Sequence: Synthetic polypeptide
GTSTEPSEGSAPGSEPATSGSETPGSPAGSPTSTEEGSTSSTAESPGPGTSTPESGSASPGSTSESPSGTAPGSTSESPSGTAPGTSTPESGSASPGTSTPESGSASPGSEPATSGSETPGTSESATPESGPGSPAGSPTSTEEGTSTEPSEGSAPGTSESATPESGPGTSTEPSEGSAPGTSTEPSEGSAPGSPAGSPTSTEEGTSTEPSEGSAPGTSTEPSEGSAPGTSESATPESGPGTSESATPESGPGTSTEPSEGSAPGTSTEPSEGSAPGTSESATPESGPGTSTEPSEGSAPGSEPATSGSETPGSPAGSPTSTEEGSSTPSGATGSPGTPGSGTASSSPGSSTPSGATGSPGTSTEPSEGSAPGTSTEPSEGSAPGSEPATSGSETPGSPAGSPTSTEEGSPAGSPTSTEEGTSTEPSEGSAPGASASGAPSTGGTSESATPESGPGSPAGSPTSTEEGSPAGSPTSTEEGSTSSTAESPGPGSTSESPSGTAPGTSPSGESSTAPGTPGSGTASSSPGSSTPSGATGSPGSSPSASTGTGPGSEPATSGSETPGTSESATPESGPGSEPATSGSETPGSTSSTAESPGPGSTSSTAESPGPGTSPSGESSTAPGSEPATSGSETPGSEPATSGSETPGTSTEPSEGSAPGSTSSTAESPGPGTSTPESGSASPGSTSESPSGTAPGTSTEPSEGSAPGTSTEPSEGSAPGTSTEPSEGSAPGSSTPSGATGSPGSSPSASTGTGPGASPGTSSTGSPGSEPATSGSETPGTSESATPESGPGSPAGSPTSTEEGSSTPSGATGSPGSSPSASTGTGPGASPGTSSTGSPGTSESATPESGPGTSTEPSEGSAPGTSTEPSEGSAPGACDTATCVTHRLAGLLSRSGGVVKNMVPTNVGSKAF

SEQ ID NO: 854 - protein, 361 aa, Artificial Sequence
  Description of Artificial Sequence: Synthetic polypeptide
MRSGCVVVHVWILAGLWLAVAGRPLAFSDAGPHVHYGWGDPIRLRHLYTSGPHGLSSCFLRIRADGVVDCARGQSAHSLLEIKAVALRTVAIKGVHSVRYLCMGADGKMQGLLQYSEEDCAFEEEIRPDGYNVYRSEKHRLPVSLSSAKQRQLYKNRGFLPLSHFLPMLPMVPEEPEDLRGHLESDMFSSPLETDSMDPFGLVTGLEAVRSPSFEKGGSEPATSGSETPGTSESATPESGPGSEPATSGSETPGSPAGSPTSTEEGTSTEPSEGSAPGSEPATSGSETPGSEPATSGSETPGSEPATSGSETPGTSTEPSEGSAPGTSESATPESGPGSEPATSGSETPGTSTEPSEGSAP

SEQ ID NO: 855 - protein, 361 aa, Artificial Sequence
  Description of Artificial Sequence: Synthetic polypeptide
MRSGCVVVHVWILAGLWLAVAGRPLAFSDAGPHVHYGWGDPIRLRHLYTSGPHGLSSCFLRIRADGVVDCARGQSAHSLLEIKAVALRTVAIKGVHSVRYLCMGADGKMQGLLQYSEEDCAFEEEIRPDGYNVYRSEKHRLPVSLSSAKQRQLYKNRGFLPLSHFLPMLPMVPEEPEDLRGHLESDMFSSPLETDSMDPFGLVTGLEAVRSPSFEKGGTSTPESGSASPGTSPSGESSTAPGTSPSGESSTAPGSTSSTAESPGPGSTSESPSGTAPGSTSSTAESPGPGTSPSGESSTAPGTSTPESGSASPGSTSSTAESPGPGTSPSGESSTAPGTSPSGESSTAPGTSPSGESSTAP

SEQ ID NO: 856 - protein, 505 aa, Artificial Sequence
  Description of Artificial Sequence: Synthetic polypeptide
MRSGCVVVHVWILAGLWLAVAGRPLAFSDAGPHVHYGWGDPIRLRHLYTSGPHGLSSCFLRIRADGVVDCARGQSAHSLLEIKAVALRTVAIKGVHSVRYLCMGADGKMQGLLQYSEEDCAFEEEIRPDGYNVYRSEKHRLPVSLSSAKQRQLYKNRGFLPLSHFLPMLPMVPEEPEDLRGHLESDMFSSPLETDSMDPFGLVTGLEAVRSPSFEKGGTSESATPESGPGSEPATSGSETPGTSESATPESGPGSEPATSGSETPGTSESATPESGPGTSTEPSEGSAPGSPAGSPTSTEEGTSESATPESGPGSEPATSGSETPGTSESATPESGPGSPAGSPTSTEEGSPAGSPTSTEEGTSTEPSEGSAPGTSESATPESGPGTSESATPESGPGTSESATPESGPGSEPATSGSETPGSEPATSGSETPGSPAGSPTSTEEGTSTEPSEGSAPGTSTEPSEGSAPGSEPATSGSETPGTSESATPESGPGTSTEPSEGSAP

SEQ ID NO: 857 - protein, 793 aa, Artificial Sequence
  Description of Artificial Sequence: Synthetic polypeptide
MRSGCVVVHVWILAGLWLAVAGRPLAFSDAGPHVHYGWGDPIRLRHLYTSGPHGLSSCFLRIRADGVVDCARGQSAHSLLEIKAVALRTVAIKGVHSVRYLCMGADGKMQGLLQYSEEDCAFEEEIRPDGYNVYRSEKHRLPVSLSSAKQRQLYKNRGFLPLSHFLPMLPMVPEEPEDLRGHLESDMFSSPLETDSMDPFGLVTGLEAVRSPSFEKGGSPAGSPTSTEEGTSESATPESGPGTSTEPSEGSAPGSPAGSPTSTEEGTSTEPSEGSAPGTSTEPSEGSAPGTSESATPESGPGSEPATSGSETPGSEPATSGSETPGSPAGSPTSTEEGTSESATPESGPGTSTEPSEGSAPGTSTEPSEGSAPGSPAGSPTSTEEGTSTEPSEGSAPGTSTEPSEGSAPGTSESATPESGPGTSTEPSEGSAPGTSESATPESGPGSEPATSGSETPGTSTEPSEGSAPGTSTEPSEGSAPGTSESATPESGPGTSESATPESGPGSPAGSPTSTEEGTSESATPESGPGSEPATSGSETPGTSESATPESGPGTSTEPSEGSAPGTSTEPSEGSAPGTSTEPSEGSAPGTSTEPSEGSAPGTSTEPSEGSAPGTSTEPSEGSAPGSPAGSPTSTEEGTSTEPSEGSAPGTSESATPESGPGSEPATSGSETPGTSESATPESGPGSEPATSGSETPGTSESATPESGPGTSTEPSEGSAPGTSESATPESGPGSPAGSPTSTEEGSPAGSPTSTEEGSPAGSPTSTEEGTSESATPESGPGTSTEPSEGSAP

SEQ ID NO: 858 - protein, 793 aa, Artificial Sequence
  Description of Artificial Sequence: Synthetic polypeptide
MRSGCVVVHVWILAGLWLAVAGRPLAFSDAGPHVHYGWGDPIRLRHLYTSGPHGLSSCFLRIRADGVVDCARGQSAHSLLEIKAVALRTVAIKGVHSVRYLCMGADGKMQGLLQYSEEDCAFEEEIRPDGYNVYRSEKHRLPVSLSSAKQRQLYKNRGFLPLSHFLPMLPMVPEEPEDLRGHLESDMFSSPLETDSMDPFGLVTGLEAVRSPSFEKGGSTSSTAESPGPGSTSSTAESPGPGSTSESPSGTAPGSTSSTAESPGPGSTSSTAESPGPGTSTPESGSASPGSTSESPSGTAPGTSPSGESSTAPGSTSESPSGTAPGSTSESPSGTAPGTSPSGESSTAPGSTSESPSGTAPGSTSESPSGTAPGTSPSGESSTAPGSTSESPSGTAPGSTSESPSGTAPGSTSESPSGTAPGTSTPESGSASPGSTSESPSGTAPGTSTPESGSASPGSTSSTAESPGPGSTSSTAESPGPGTSTPESGSASPGTSTPESGSASPGSTSESPSGTAPGTSTPESGSASPGTSTPESGSASPGSTSESPSGTAPGSTSESPSGTAPGSTSESPSGTAPGSTSSTAESPGPGTSTPESGSASPGTSTPESGSASPGSTSESPSGTAPGSTSESPSGTAPGTSTPESGSASPGSTSESPSGTAPGSTSESPSGTAPGTSTPESGSASPGTSPSGESSTAPGSTSSTAESPGPGTSPSGESSTAPGSTSSTAESPGPGTSTPESGSASPGSTSESPSGTAPGSTSSTAESPGPGTSTPESGSASPGTSTPESGSASP

SEQ ID NO: 859 - protein, 1053 aa, Artificial Sequence
  Description of Artificial Sequence: Synthetic polypeptide
MRSGCVVVHVWILAGLWLAVAGRPLAFSDAGPHVHYGWGDPIRLRHLYTSGPHGLSSCFLRIRADGVVDCARGQSAHSLLEIKAVALRTVAIKGVHSVRYLCMGADGKMQGLLQYSEEDCAFEEEIRPDGYNVYRSEKHRLPVSLSSAKQRQLYKNRGFLPLSHFLPMLPMVPEEPEDLRGHLESDMFSSPLETDSMDPFGLVTGLEAVRSPSFEKGGSSESGSSEGGPGSSESGSSEGGPGESPGGSSGSESGSGGEPSESGSSGESPGGSSGSESGESPGGSSGSESGSSESGSSEGGPGSSESGSSEGGPGSSESGSSEGGPGESPGGSSGSESGESPGGSSGSESGESPGGSSGSESGSSESGSSEGGPGSSESGSSEGGPGSSESGSSEGGPGSSESGSSEGGPGSSESGSSEGGPGSSESGSSEGGPGSGGEPSESGSSGESPGGSSGSESGESPGGSSGSESGSGGEPSESGSSGSEGSSGPGESSGSSESGSSEGGPGSGGEPSESGSSGSEGSSGPGESSGSSESGSSEGGPGSGGEPSESGSSGESPGGSSGSESGSGGEPSESGSSGSGGEPSESGSSGSSESGSSEGGPGSGGEPSESGSSGSGGEPSESGSSGSEGSSGPGESSGESPGGSSGSESGSEGSSGPGESSGSEGSSGPGESSGSGGEPSESGSSGSSESGSSEGGPGSSESGSSEGGPGESPGGSSGSESGSGGEPSESGSSGSEGSSGPGESSGESPGGSSGSESGSEGSSGPGSSESGSSEGGPGSGGEPSESGSSGSEGSSGPGESSGSEGSSGPGESSGSEGSSGPGESSGSGGEPSESGSSGSGGEPSESGSSGESPGGSSGSESGESPGGSSGSESGSGGEPSESGSSGSEGSSGPGESSGESPGGSSGSESGSSESGSSEGGPGSSESGSSEGGPGSSESGSSEGGPGSGGEPSESGSSGSSESGSSEGGPGESPGGSSGSESGSGGEPSESGSSGSSESGSSEGGPGESPGGSSGSESGSGGEPSESGSSGESPGGSSGSESGSGGEPSESGSS

SEQ ID NO: 860 - protein, 1081 aa, Artificial Sequence
  Description of Artificial Sequence: Synthetic polypeptide
MRSGCVVVHVWILAGLWLAVAGRPLAFSDAGPHVHYGWGDPIRLRHLYTSGPHGLSSCFLRIRADGVVDCARGQSAHSLLEIKAVALRTVAIKGVHSVRYLCMGADGKMQGLLQYSEEDCAFEEEIRPDGYNVYRSEKHRLPVSLSSAKQRQLYKNRGFLPLSHFLPMLPMVPEEPEDLRGHLESDMFSSPLETDSMDPFGLVTGLEAVRSPSFEKGGSPAGSPTSTEEGTSESATPESGPGTSTEPSEGSAPGSPAGSPTSTEEGTSTEPSEGSAPGTSTEPSEGSAPGTSESATPESGPGSEPATSGSETPGSEPATSGSETPGSPAGSPTSTEEGTSESATPESGPGTSTEPSEGSAPGTSTEPSEGSAPGSPAGSPTSTEEGTSTEPSEGSAPGTSTEPSEGSAPGTSESATPESGPGTSTEPSEGSAPGTSESATPESGPGSEPATSGSETPGTSTEPSEGSAPGTSTEPSEGSAPGTSESATPESGPGTSESATPESGPGSPAGSPTSTEEGTSESATPESGPGSEPATSGSETPGTSESATPESGPGTSTEPSEGSAPGTSTEPSEGSAPGTSTEPSEGSAPGTSTEPSEGSAPGTSTEPSEGSAPGTSTEPSEGSAPGSPAGSPTSTEEGTSTEPSEGSAPGTSESATPESGPGSEPATSGSETPGTSESATPESGPGSEPATSGSETPGTSESATPESGPGTSTEPSEGSAPGTSESATPESGPGSPAGSPTSTEEGSPAGSPTSTEEGSPAGSPTSTEEGTSESATPESGPGTSTEPSEGSAPGTSESATPESGPGSEPATSGSETPGTSESATPESGPGSEPATSGSETPGTSESATPESGPGTSTEPSEGSAPGSPAGSPTSTEEGTSESATPESGPGSEPATSGSETPGTSESATPESGPGSPAGSPTSTEEGSPAGSPTSTEEGTSTEPSEGSAPGTSESATPESGPGTSESATPESGPGTSESATPESGPGSEPATSGSETPGSEPATSGSETPGSPAGSPTSTEEGTSTEPSEGSAPGTSTEPSEGSAPGSEPATSGSETPGTSESATPESGPGTSTEPSEGSAP

SEQ ID NO: 861 - protein, 1092 aa, Artificial Sequence
  Description of Artificial Sequence: Synthetic polypeptide
  MOD_RES (647)..(649): Any amino acid
  MOD_RES (660)..(663): Any amino acid
MRSGCVVVHVWILAGLWLAVAGRPLAFSDAGPHVHYGWGDPIRLRHLYTSGPHGLSSCFLRIRADGVVDCARGQSAHSLLEIKAVALRTVAIKGVHSVRYLCMGADGKMQGLLQYSEEDCAFEEEIRPDGYNVYRSEKHRLPVSLSSAKQRQLYKNRGFLPLSHFLPMLPMVPEEPEDLRGHLESDMFSSPLETDSMDPFGLVTGLEAVRSPSFEKGGSTSESPSGTAPGTSPSGESSTAPGSTSESPSGTAPGSTSESPSGTAPGTSTPESGSASPGTSTPESGSASPGSTSESPSGTAPGSTSESPSGTAPGTSPSGESSTAPGSTSESPSGTAPGTSPSGESSTAPGTSPSGESSTAPGSTSSTAESPGPGTSPSGESSTAPGTSPSGESSTAPGSTSSTAESPGPGTSTPESGSASPGTSTPESGSASPGSTSESPSGTAPGSTSESPSGTAPGTSTPESGSASPGSTSSTAESPGPGTSTPESGSASPGSTSESPSGTAPGTSPSGESSTAPGSTSSTAESPGPGTSPSGESSTAPGTSTPESGSASPGSTSSTAESPGPGSTSSTAESPGPGSTSSTAESPGPGSTSSTAESPGPGTSPSGESSTAPGSTSESPSGTAPGSTSESPSGTAPGTSTPESGPXXXGASASGAPSTXXXXSESPSGTAPGSTSESPSGTAPGSTSESPSGTAPGSTSESPSGTAPGSTSESPSGTAPGSTSESPSGTAPGTSTPESGSASPGTSPSGESSTAPGTSPSGESSTAPGSTSSTAESPGPGTSPSGESSTAPGTSTPESGSASPGSTSESPSGTAPGSTSESPSGTAPGTSPSGESSTAPGSTSESPSGTAPGTSTPESGSASPGTSTPESGSASPGSTSESPSGTAPGTSTPESGSASPGSTSSTAESPGPGSTSESPSGTAPGSTSESPSGTAPGTSPSGESSTAPGSTSSTAESPGPGTSPSGESSTAPGTSTPESGSASPGTSPSGESSTAPGTSPSGESSTAPGTSPSGESSTAPGSTSSTAESPGPGSTSSTAESPGPGTSPSGESSTAPGSSPSASTGTGPGSSTPSGATGSPGSSTPSGATGSP

SEQ ID NO: 862 - protein, 1081 aa, Artificial Sequence
  Description of Artificial Sequence: Synthetic polypeptide
MRSGCVVVHVWILAGLWLAVAGRPLAFSDAGPHVHYGWGDPIRLRHLYTSGPHGLSSCFLRIRADGVVDCARGQSAHSLLEIKAVALRTVAIKGVHSVRYLCMGADGKMQGLLQYSEEDCAFEEEIRPDGYNVYRSEKHRLPVSLSSAKQRQLYKNRGFLPLSHFLPMLPMVPEEPEDLRGHLESDMFSSPLETDSMDPFGLVTGLEAVRSPSFEKGGASPGTSSTGSPGSSPSASTGTGPGSSPSASTGTGPGTPGSGTASSSPGSSTPSGATGSPGSNPSASTGTGPGASPGTSSTGSPGTPGSGTASSSPGSSTPSGATGSPGTPGSGTASSSPGASPGTSSTGSPGASPGTSSTGSPGTPGSGTASSSPGSSTPSGATGSPGASPGTSSTGSPGTPGSGTASSSPGSSTPSGATGSPGSNPSASTGTGPGSSPSASTGTGPGSSTPSGATGSPGSSTPSGATGSPGASPGTSSTGSPGASPGTSSTGSPGASPGTSSTGSPGTPGSGTASSSPGASPGTSSTGSPGASPGTSSTGSPGASPGTSSTGSPGSSPSASTGTGPGTPGSGTASSSPGASPGTSSTGSPGASPGTSSTGSPGASPGTSSTGSPGSSTPSGATGSPGSSTPSGATGSPGASPGTSSTGSPGTPGSGTASSSPGSSTPSGATGSPGSSTPSGATGSPGSSTPSGATGSPGSSPSASTGTGPGASPGTSSTGSPGASPGTSSTGSPGTPGSGTASSSPGASPGTSSTGSPGASPGTSSTGSPGASPGTSSTGSPGASPGTSSTGSPGTPGSGTASSSPGSSTPSGATGSPGTPGSGTASSSPGSSTPSGATGSPGTPGSGTASSSPGSSTPSGATGSPGSSTPSGATGSPGSSPSASTGTGPGSSPSASTGTGPGASPGTSSTGSPGTPGSGTASSSPGSSTPSGATGSPGSSPSASTGTGPGSSPSASTGTGPGASPGTSSTGSPGASPGTSSTGSPGSSTPSGATGSPGSSPSASTGTGPGASPGTSSTGSPGSSPSASTGTGPGTPGSGTASSSPGSSTPSGATGSPGSSTPSGATGSPGASPGTSSTGSP

SEQ ID NO: 863 - protein, 1092 aa, Artificial Sequence
  Description of Artificial Sequence: Synthetic polypeptide
MRSGCVVVHVWILAGLWLAVAGRPLAFSDAGPHVHYGWGDPIRLRHLYTSGPHGLSSCFLRIRADGVVDCARGQSAHSLLEIKAVALRTVAIKGVHSVRYLCMGADGKMQGLLQYSEEDCAFEEEIRPDGYNVYRSEKHRLPVSLSSAKQRQLYKNRGFLPLSHFLPMLPMVPEEPEDLRGHLESDMFSSPLETDSMDPFGLVTGLEAVRSPSFEKGGTSTEPSEGSAPGSEPATSGSETPGSPAGSPTSTEEGSTSSTAESPGPGTSTPESGSASPGSTSESPSGTAPGSTSESPSGTAPGTSTPESGSASPGTSTPESGSASPGSEPATSGSETPGTSESATPESGPGSPAGSPTSTEEGTSTEPSEGSAPGTSESATPESGPGTSTEPSEGSAPGTSTEPSEGSAPGSPAGSPTSTEEGTSTEPSEGSAPGTSTEPSEGSAPGTSESATPESGPGTSESATPESGPGTSTEPSEGSAPGTSTEPSEGSAPGTSESATPESGPGTSTEPSEGSAPGSEPATSGSETPGSPAGSPTSTEEGSSTPSGATGSPGTPGSGTASSSPGSSTPSGATGSPGTSTEPSEGSAPGTSTEPSEGSAPGSEPATSGSETPGSPAGSPTSTEEGSPAGSPTSTEEGTSTEPSEGSAPGASASGAPSTGGTSESATPESGPGSPAGSPTSTEEGSPAGSPTSTEEGSTSSTAESPGPGSTSESPSGTAPGTSPSGESSTAPGTPGSGTASSSPGSSTPSGATGSPGSSPSASTGTGPGSEPATSGSETPGTSESATPESGPGSEPATSGSETPGSTSSTAESPGPGSTSSTAESPGPGTSPSGESSTAPGSEPATSGSETPGSEPATSGSETPGTSTEPSEGSAPGSTSSTAESPGPGTSTPESGSASPGSTSESPSGTAPGTSTEPSEGSAPGTSTEPSEGSAPGTSTEPSEGSAPGSSTPSGATGSPGSSPSASTGTGPGASPGTSSTGSPGSEPATSGSETPGTSESATPESGPGSPAGSPTSTEEGSSTPSGATGSPGSSPSASTGTGPGASPGTSSTGSPGTSESATPESGPGTSTEPSEGSAPGTSTEPSEGSAP

SEQ ID NO: 864 - protein, 1535 aa, Artificial Sequence
  Description of Artificial Sequence: Synthetic polypeptide
MRSGCVVVHVWILAGLWLAVAGRPLAFSDAGPHVHYGWGDPIRLRHLYTSGPHGLSSCFLRIRADGVVDCARGQSAHSLLEIKAVALRTVAIKGVHSVRYLCMGADGKMQGLLQYSEEDCAFEEEIRPDGYNVYRSEKHRLPVSLSSAKQRQLYKNRGFLPLSHFLPMLPMVPEEPEDLRGHLESDMFSSPLETDSMDPFGLVTGLEAVRSPSFEKGGTSTEPSEGSAPGSEPATSGSETPGSPAGSPTSTEEGSTSSTAESPGPGTSTPESGSASPGSTSESPSGTAPGSTSESPSGTAPGTSTPESGSASPGTSTPESGSASPGSEPATSGSETPGTSESATPESGPGSPAGSPTSTEEGTSTEPSEGSAPGTSESATPESGPGTSTEPSEGSAPGTSTEPSEGSAPGSPAGSPTSTEEGTSTEPSEGSAPGTSTEPSEGSAPGTSESATPESGPGTSESATPESGPGTSTEPSEGSAPGTSTEPSEGSAPGTSESATPESGPGTSTEPSEGSAPGSEPATSGSETPGSPAGSPTSTEEGSSTPSGATGSPGTPGSGTASSSPGSSTPSGATGSPGTSTEPSEGSAPGTSTEPSEGSAPGSEPATSGSETPGSPAGSPTSTEEGSPAGSPTSTEEGTSTEPSEGSAPGPEPTGPAPSGGSEPATSGSETPGTSESATPESGPGSPAGSPTSTEEGTSESATPESGPGSPAGSPTSTEEGSPAGSPTSTEEGTSESATPESGPGSPAGSPTSTEEGSPAGSPTSTEEGSTSSTAESPGPGSTSESPSGTAPGTSPSGESSTAPGSTSESPSGTAPGSTSESPSGTAPGTSPSGESSTAPGTSTEPSEGSAPGTSESATPESGPGTSESATPESGPGSEPATSGSETPGTSESATPESGPGTSESATPESGPGTSTEPSEGSAPGTSESATPESGPGTSTEPSEGSAPGTSPSGESSTAPGTSPSGESSTAPGTSPSGESSTAPGTSTEPSEGSAPGSPAGSPTSTEEGTSTEPSEGSAPGSSPSASTGTGPGSSTPSGATGSPGSSTPSGATGSPGSSTPSGATGSPGSSTPSGATGSPGASPGTSSTGSPGASASGAPSTGGTSPSGESSTAPGSTSSTAESPGPGTSPSGESSTAPGTSESATPESGPGTSTEPSEGSAPGTSTEPSEGSAPGSSPSASTGTGPGSSTPSGATGSPGASPGTSSTGSPGTSTPESGSASPGTSPSGESSTAPGTSPSGESSTAPGTSESATPESGPGSEPATSGSETPGTSTEPSEGSAPGSTSESPSGTAPGSTSESPSGTAPGTSTPESGSASPGSPAGSPTSTEEGTSESATPESGPGTSTEPSEGSAPGSPAGSPTSTEEGTSESATPESGPGSEPATSGSETPGSSTPSGATGSPGASPGTSSTGSPGSSTPSGATGSPGSTSESPSGTAPGTSPSGESSTAPGSTSSTAESPGPGSSTPSGATGSPGASPGTSSTGSPGTPGSGTASSSPGSPAGSPTSTEEGSPAGSPTSTEEGTSTEPSEGSAP

SEQ ID NO: 865 - protein, 1130 aa, Artificial Sequence
  Description of Artificial Sequence: Synthetic polypeptide
MAEPAGSPTSTEEGTPGSGTASSSPGSSTPSGATGSPGASPGTSSTGSPGSPAGSPTSTEEGTSESATPESGPGTSTEPSEGSAPGSPAGSPTSTEEGTSTEPSEGSAPGTSTEPSEGSAPGTSESATPESGPGSEPATSGSETPGSEPATSGSETPGSPAGSPTSTEEGTSESATPESGPGTSTEPSEGSAPGTSTEPSEGSAPGSPAGSPTSTEEGTSTEPSEGSAPGTSTEPSEGSAPGTSESATPESGPGTSTEPSEGSAPGTSESATPESGPGSEPATSGSETPGTSTEPSEGSAPGTSTEPSEGSAPGTSESATPESGPGTSESATPESGPGSPAGSPTSTEEGTSESATPESGPGSEPATSGSETPGTSESATPESGPGTSTEPSEGSAPGTSTEPSEGSAPGTSTEPSEGSAPGTSTEPSEGSAPGTSTEPSEGSAPGTSTEPSEGSAPGSPAGSPTSTEEGTSTEPSEGSAPGTSESATPESGPGSEPATSGSETPGTSESATPESGPGSEPATSGSETPGTSESATPESGPGTSTEPSEGSAPGTSESATPESGPGSPAGSPTSTEEGSPAGSPTSTEEGSPAGSPTSTEEGTSESATPESGPGTSTEPSEGSAPGTSESATPESGPGSEPATSGSETPGTSESATPESGPGSEPATSGSETPGTSESATPESGPGTSTEPSEGSAPGSPAGSPTSTEEGTSESATPESGPGSEPATSGSETPGTSESATPESGPGSPAGSPTSTEEGSPAGSPTSTEEGTSTEPSEGSAPGTSESATPESGPGTSESATPESGPGTSESATPESGPGSEPATSGSETPGSEPATSGSETPGSPAGSPTSTEEGTSTEPSEGSAPGTSTEPSEGSAPGSEPATSGSETPGTSESATPESGPGTSTEPSEGSAPGMRSGCVVVHVWILAGLWLAVAGRPLAFSDAGPHVHYGWGDPIRLRHLYTSGPHGLSSCFLRIRADGVVDCARGQSAHSLLEIKAVALRTVAIKGVHSVRYLCMGADGKMQGLLQYSEEDCAFEEEIRPDGYNVYRSEKHRLPVSLSSAKQRQLYKNRGFLPLSHFLPMLPMVPEEPEDLRGHLESDMFSSPLETDSMDPFGLVTGLEAVRSPSFEK

SEQ ID NO: 866 - protein, 1141 aa, Artificial Sequence
  Description of Artificial Sequence: Synthetic polypeptide
MAEPAGSPTSTEEGASPGTSSTGSPGSSTPSGATGSPGSSTPSGATGSPGTSTEPSEGSAPGSEPATSGSETPGSPAGSPTSTEEGSTSSTAESPGPGTSTPESGSASPGSTSESPSGTAPGSTSESPSGTAPGTSTPESGSASPGTSTPESGSASPGSEPATSGSETPGTSESATPESGPGSPAGSPTSTEEGTSTEPSEGSAPGTSESATPESGPGTSTEPSEGSAPGTSTEPSEGSAPGSPAGSPTSTEEGTSTEPSEGSAPGTSTEPSEGSAPGTSESATPESGPGTSESATPESGPGTSTEPSEGSAPGTSTEPSEGSAPGTSESATPESGPGTSTEPSEGSAPGSEPATSGSETPGSPAGSPTSTEEGSSTPSGATGSPGTPGSGTASSSPGSSTPSGATGSPGTSTEPSEGSAPGTSTEPSEGSAPGSEPATSGSETPGSPAGSPTSTEEGSPAGSPTSTEEGTSTEPSEGSAPGASASGAPSTGGTSESATPESGPGSPAGSPTSTEEGSPAGSPTSTEEGSTSSTAESPGPGSTSESPSGTAPGTSPSGESSTAPGTPGSGTASSSPGSSTPSGATGSPGSSPSASTGTGPGSEPATSGSETPGTSESATPESGPGSEPATSGSETPGSTSSTAESPGPGSTSSTAESPGPGTSPSGESSTAPGSEPATSGSETPGSEPATSGSETPGTSTEPSEGSAPGSTSSTAESPGPGTSTPESGSASPGSTSESPSGTAPGTSTEPSEGSAPGTSTEPSEGSAPGTSTEPSEGSAPGSSTPSGATGSPGSSPSASTGTGPGASPGTSSTGSPGSEPATSGSETPGTSESATPESGPGSPAGSPTSTEEGSSTPSGATGSPGSSPSASTGTGPGASPGTSSTGSPGTSESATPESGPGTSTEPSEGSAPGTSTEPSEGSAPGMRSGCVVVHVWILAGLWLAVAGRPLAFSDAGPHVHYGWGDPIRLRHLYTSGPHGLSSCFLRIRADGVVDCARGQSAHSLLEIKAVALRTVAIKGVHSVRYLCMGADGKMQGLLQYSEEDCAFEEEIRPDGYNVYRSEKHRLPVSLSSAKQRQLYKNRGFLPLSHFLPMLPMVPEEPEDLRGHLESDMFSSPLETDSMDPFGLVTGLEAVRSPSFEK

SEQ ID NO: 867 - protein, 361 aa, Artificial Sequence
  Description of Artificial Sequence: Synthetic polypeptide
GSEPATSGSETPGTSESATPESGPGSEPATSGSETPGSPAGSPTSTEEGTSTEPSEGSAPGSEPATSGSETPGSEPATSGSETPGSEPATSGSETPGTSTEPSEGSAPGTSESATPESGPGSEPATSGSETPGTSTEPSEGSAPGMRSGCVVVHVWILAGLWLAVAGRPLAFSDAGPHVHYGWGDPIRLRHLYTSGPHGLSSCFLRIRADGVVDCARGQSAHSLLEIKAVALRTVAIKGVHSVRYLCMGADGKMQGLLQYSEEDCAFEEEIRPDGYNVYRSEKHRLPVSLSSAKQRQLYKNRGFLPLSHFLPMLPMVPEEPEDLRGHLESDMFSSPLETDSMDPFGLVTGLEAVRSPSFEK

SEQ ID NO: 868 - protein, 361 aa, Artificial Sequence
  Description of Artificial Sequence: Synthetic polypeptide
GTSTPESGSASPGTSPSGESSTAPGTSPSGESSTAPGSTSSTAESPGPGSTSESPSGTAPGSTSSTAESPGPGTSPSGESSTAPGTSTPESGSASPGSTSSTAESPGPGTSPSGESSTAPGTSPSGESSTAPGTSPSGESSTAPGMRSGCVVVHVWILAGLWLAVAGRPLAFSDAGPHVHYGWGDPIRLRHLYTSGPHGLSSCFLRIRADGVVDCARGQSAHSLLEIKAVALRTVAIKGVHSVRYLCMGADGKMQGLLQYSEEDCAFEEEIRPDGYNVYRSEKHRLPVSLSSAKQRQLYKNRGFLPLSHFLPMLPMVPEEPEDLRGHLESDMFSSPLETDSMDPFGLVTGLEAVRSPSFEK

SEQ ID NO: 869 - protein, 505 aa, Artificial Sequence
  Description of Artificial Sequence: Synthetic polypeptide
GTSESATPESGPGSEPATSGSETPGTSESATPESGPGSEPATSGSETPGTSESATPESGPGTSTEPSEGSAPGSPAGSPTSTEEGTSESATPESGPGSEPATSGSETPGTSESATPESGPGSPAGSPTSTEEGSPAGSPTSTEEGTSTEPSEGSAPGTSESATPESGPGTSESATPESGPGTSESATPESGPGSEPATSGSETPGSEPATSGSETPGSPAGSPTSTEEGTSTEPSEGSAPGTSTEPSEGSAPGSEPATSGSETPGTSESATPESGPGTSTEPSEGSAPGMRSGCVVVHVWILAGLWLAVAGRPLAFSDAGPHVHYGWGDPIRLRHLYTSGPHGLSSCFLRIRADGVVDCARGQSAHSLLEIKAVALRTVAIKGVHSVRYLCMGADGKMQGLLQYSEEDCAFEEEIRPDGYNVYRSEKHRLPVSLSSAKQRQLYKNRGFLPLSHFLPMLPMVPEEPEDLRGHLESDMFSSPLETDSMDPFGLVTGLEAVRSPSFEK

SEQ ID NO: 870 - protein, 793 aa, Artificial Sequence
  Description of Artificial Sequence: Synthetic polypeptide
GSPAGSPTSTEEGTSESATPESGPGTSTEPSEGSAPGSPAGSPTSTEEGTSTEPSEGSAPGTSTEPSEGSAPGTSESATPESGPGSEPATSGSETPGSEPATSGSETPGSPAGSPTSTEEGTSESATPESGPGTSTEPSEGSAPGTSTEPSEGSAPGSPAGSPTSTEEGTSTEPSEGSAPGTSTEPSEGSAPGTSESATPESGPGTSTEPSEGSAPGTSESATPESGPGSEPATSGSETPGTSTEPSEGSAPGTSTEPSEGSAPGTSESATPESGPGTSESATPESGPGSPAGSPTSTEEGTSESATPESGPGSEPATSGSETPGTSESATPESGPGTSTEPSEGSAPGTSTEPSEGSAPGTSTEPSEGSAPGTSTEPSEGSAPGTSTEPSEGSAPGTSTEPSEGSAPGSPAGSPTSTEEGTSTEPSEGSAPGTSESATPESGPGSEPATSGSETPGTSESATPESGPGSEPATSGSETPGTSESATPESGPGTSTEPSEGSAPGTSESATPESGPGSPAGSPTSTEEGSPAGSPTSTEEGSPAGSPTSTEEGTSESATPESGPGTSTEPSEGSAPGMRSGCVVVHVWILAGLWLAVAGRPLAFSDAGPHVHYGWGDPIRLRHLYTSGPHGLSSCFLRIRADGVVDCARGQSAHSLLEIKAVALRTVAIKGVHSVRYLCMGADGKMQGLLQYSEEDCAFEEEIRPDGYNVYRSEKHRLPVSLSSAKQRQLYKNRGFLPLSHFLPMLPMVPEEPEDLRGHLESDMFSSPLETDSMDPFGLVTGLEAVRSPSFEK

SEQ ID NO: 871 - protein, 793 aa, Artificial Sequence
  Description of Artificial Sequence: Synthetic polypeptide
GSTSSTAESPGPGSTSSTAESPGPGSTSESPSGTAPGSTSSTAESPGPGSTSSTAESPGPGTSTPESGSASPGSTSESPSGTAPGTSPSGESSTAPGSTSESPSGTAPGSTSESPSGTAPGTSPSGESSTAPGSTSESPSGTAPGSTSESPSGTAPGTSPSGESSTAPGSTSESPSGTAPGSTSESPSGTAPGSTSESPSGTAPGTSTPESGSASPGSTSESPSGTAPGTSTPESGSASPGSTSSTAESPGPGSTSSTAESPGPGTSTPESGSASPGTSTPESGSASPGSTSESPSGTAPGTSTPESGSASPGTSTPESGSASPGSTSESPSGTAPGSTSESPSGTAPGSTSESPSGTAPGSTSSTAESPGPGTSTPESGSASPGTSTPESGSASPGSTSESPSGTAPGSTSESPSGTAPGTSTPESGSASPGSTSESPSGTAPGSTSESPSGTAPGTSTPESGSASPGTSPSGESSTAPGSTSSTAESPGPGTSPSGESSTAPGSTSSTAESPGPGTSTPESGSASPGSTSESPSGTAPGSTSSTAESPGPGTSTPESGSASPGTSTPESGSASPGMRSGCVVVHVWILAGLWLAVAGRPLAFSDAGPHVHYGWGDPIRLRHLYTSGPHGLSSCFLRIRADGVVDCARGQSAHSLLEIKAVALRTVAIKGVHSVRYLCMGADGKMQGLLQYSEEDCAFEEEIRPDGYNVYRSEKHRLPVSLSSAKQRQLYKNRGFLPLSHFLPMLPMVPEEPEDLRGHLESDMFSSPLETDSMDPFGLVTGLEAVRSPSFEK

SEQ ID NO: 872 - protein, 1053 aa, Artificial Sequence
  Description of Artificial Sequence: Synthetic polypeptide
GSSESGSSEGGPGSSESGSSEGGPGESPGGSSGSESGSGGEPSESGSSGESPGGSSGSESGESPGGSSGSESGSSESGSSEGGPGSSESGSSEGGPGSSESGSSEGGPGESPGGSSGSESGESPGGSSGSESGESPGGSSGSESGSSESGSSEGGPGSSESGSSEGGPGSSESGSSEGGPGSSESGSSEGGPGSSESGSSEGGPGSSESGSSEGGPGSGGEPSESGSSGESPGGSSGSESGESPGGSSGSESGSGGEPSESGSSGSEGSSGPGESSGSSESGSSEGGPGSGGEPSESGSSGSEGSSGPGESSGSSESGSSEGGPGSGGEPSESGSSGESPGGSSGSESGSGGEPSESGSSGSGGEPSESGSSGSSESGSSEGGPGSGGEPSESGSSGSGGEPSESGSSGSEGSSGPGESSGESPGGSSGSESGSEGSSGPGESSGSEGSSGPGESSGSGGEPSESGSSGSSESGSSEGGPGSSESGSSEGGPGESPGGSSGSESGSGGEPSESGSSGSEGSSGPGESSGESPGGSSGSESGSEGSSGPGSSESGSSEGGPGSGGEPSESGSSGSEGSSGPGESSGSEGSSGPGESSGSEGSSGPGESSGSGGEPSESGSSGSGGEPSESGSSGESPGGSSGSESGESPGGSSGSESGSGGEPSESGSSGSEGSSGPGESSGESPGGSSGSESGSSESGSSEGGPGSSESGSSEGGPGSSESGSSEGGPGSGGEPSESGSSGSSESGSSEGGPGESPGGSSGSESGSGGEPSESGSSGSSESGSSEGGPGESPGGSSGSESGSGGEPSESGSSGESPGGSSGSESGSGGEPSESGSSGMRSGCVVVHVWILAGLWLAVAGRPLAFSDAGPHVHYGWGDPIRLRHLYTSGPHGLSSCFLRIRADGVVDCARGQSAHSLLEIKAVALRTVAIKGVHSVRYLCMGADGKMQGLLQYSEEDCAFEEEIRPDGYNVYRSEKHRLPVSLSSAKQRQLYKNRGFLPLSHFLPMLPMVPEEPEDLRGHLESDMFSSPLETDSMDPFGLVTGLEAVRSPSFEK

SEQ ID NO: 873 - protein, 1081 aa, Artificial Sequence
  Description of Artificial Sequence: Synthetic polypeptide
GSPAGSPTSTEEGTSESATPESGPGTSTEPSEGSAPGSPAGSPTSTEEGTSTEPSEGSAPGTSTEPSEGSAPGTSESATPESGPGSEPATSGSETPGSEPATSGSETPGSPAGSPTSTEEGTSESATPESGPGTSTEPSEGSAPGTSTEPSEGSAPGSPAGSPTSTEEGTSTEPSEGSAPGTSTEPSEGSAPGTSESATPESGPGTSTEPSEGSAPGTSESATPESGPGSEPATSGSETPGTSTEPSEGSAPGTSTEPSEGSAPGTSESATPESGPGTSESATPESGPGSPAGSPTSTEEGTSESATPESGPGSEPATSGSETPGTSESATPESGPGTSTEPSEGSAPGTSTEPSEGSAPGTSTEPSEGSAPGTSTEPSEGSAPGTSTEPSEGSAPGTSTEPSEGSAPGSPAGSPTSTEEGTSTEPSEGSAPGTSESATPESGPGSEPATSGSETPGTSESATPESGPGSEPATSGSETPGTSESATPESGPGTSTEPSEGSAPGTSESATPESGPGSPAGSPTSTEEGSPAGSPTSTEEGSPAGSPTSTEEGTSESATPESGPGTSTEPSEGSAPGTSESATPESGPGSEPATSGSETPGTSESATPESGPGSEPATSGSETPGTSESATPESGPGTSTEPSEGSAPGSPAGSPTSTEEGTSESATPESGPGSEPATSGSETPGTSESATPESGPGSPAGSPTSTEEGSPAGSPTSTEEGTSTEPSEGSAPGTSESATPESGPGTSESATPESGPGTSESATPESGPGSEPATSGSETPGSEPATSGSETPGSPAGSPTSTEEGTSTEPSEGSAPGTSTEPSEGSAPGSEPATSGSETPGTSESATPESGPGTSTEPSEGSAPGMRSGCVVVHVWILAGLWLAVAGRPLAFSDAGPHVHYGWGDPIRLRHLYTSGPHGLSSCFLRIRADGVVDCARGQSAHSLLEIKAVALRTVAIKGVHSVRYLCMGADGKMQGLLQYSEEDCAFEEEIRPDGYNVYRSEKHRLPVSLSSAKQRQLYKNRGFLPLSHFLPMLPMVPEEPEDLRGHLESDMFSSPLETDSMDPFGLVTGLEAVRSPSFEK

SEQ ID NO: 874 - protein, 1092 aa, Artificial Sequence
  Description of Artificial Sequence: Synthetic polypeptide
  MOD_RES (430)..(432): Any amino acid
  MOD_RES (443)..(446): Any amino acid
GSTSESPSGTAPGTSPSGESSTAPGSTSESPSGTAPGSTSESPSGTAPGTSTPESGSASPGTSTPESGSASPGSTSESPSGTAPGSTSESPSGTAPGTSPSGESSTAPGSTSESPSGTAPGTSPSGESSTAPGTSPSGESSTAPGSTSSTAESPGPGTSPSGESSTAPGTSPSGESSTAPGSTSSTAESPGPGTSTPESGSASPGTSTPESGSASPGSTSESPSGTAPGSTSESPSGTAPGTSTPESGSASPGSTSSTAESPGPGTSTPESGSASPGSTSESPSGTAPGTSPSGESSTAPGSTSSTAESPGPGTSPSGESSTAPGTSTPESGSASPGSTSSTAESPGPGSTSSTAESPGPGSTSSTAESPGPGSTSSTAESPGPGTSPSGESSTAPGSTSESPSGTAPGSTSESPSGTAPGTSTPESGPXXXGASASGAPSTXXXXSESPSGTAPGSTSESPSGTAPGSTSESPSGTAPGSTSESPSGTAPGSTSESPSGTAPGSTSESPSGTAPGTSTPESGSASPGTSPSGESSTAPGTSPSGESSTAPGSTSSTAESPGPGTSPSGESSTAPGTSTPESGSASPGSTSESPSGTAPGSTSESPSGTAPGTSPSGESSTAPGSTSESPSGTAPGTSTPESGSASPGTSTPESGSASPGSTSESPSGTAPGTSTPESGSASPGSTSSTAESPGPGSTSESPSGTAPGSTSESPSGTAPGTSPSGESSTAPGSTSSTAESPGPGTSPSGESSTAPGTSTPESGSASPGTSPSGESSTAPGTSPSGESSTAPGTSPSGESSTAPGSTSSTAESPGPGSTSSTAESPGPGTSPSGESSTAPGSSPSASTGTGPGSSTPSGATGSPGSSTPSGATGSPGMRSGCVVVHVWILAGLWLAVAGRPLAFSDAGPHVHYGWGDPIRLRHLYTSGPHGLSSCFLRIRADGVVDCARGQSAHSLLEIKAVALRTVAIKGVHSVRYLCMGADGKMQGLLQYSEEDCAFEEEIRPDGYNVYRSEKHRLPVSLSSAKQRQLYKNRGFLPLSHFLPMLPMVPEEPEDLRGHLESDMFSSPLETDSMDPFGLVTGLEAVRSPSFEK

SEQ ID NO: 875 - protein, 1081 aa, Artificial Sequence
  Description of Artificial Sequence: Synthetic polypeptide
GASPGTSSTGSPGSSPSASTGTGPGSSPSASTGTGPGTPGSGTASSSPGSSTPSGATGSPGSNPSASTGTGPGASPGTSSTGSPGTPGSGTASSSPGSSTPSGATGSPGTPGSGTASSSPGASPGTSSTGSPGASPGTSSTGSPGTPGSGTASSSPGSSTPSGATGSPGASPGTSSTGSPGTPGSGTASSSPGSSTPSGATGSPGSNPSASTGTGPGSSPSASTGTGPGSSTPSGATGSPGSSTPSGATGSPGASPGTSSTGSPGASPGTSSTGSPGASPGTSSTGSPGTPGSGTASSSPGASPGTSSTGSPGASPGTSSTGSPGASPGTSSTGSPGSSPSASTGTGPGTPGSGTASSSPGASPGTSSTGSPGASPGTSSTGSPGASPGTSSTGSPGSSTPSGATGSPGSSTPSGATGSPGASPGTSSTGSPGTPGSGTASSSPGSSTPSGATGSPGSSTPSGATGSPGSSTPSGATGSPGSSPSASTGTGPGASPGTSSTGSPGASPGTSSTGSPGTPGSGTASSSPGASPGTSSTGSPGASPGTSSTGSPGASPGTSSTGSPGASPGTSSTGSPGTPGSGTASSSPGSSTPSGATGSPGTPGSGTASSSPGSSTPSGATGSPGTPGSGTASSSPGSSTPSGATGSPGSSTPSGATGSPGSSPSASTGTGPGSSPSASTGTGPGASPGTSSTGSPGTPGSGTASSSPGSSTPSGATGSPGSSPSASTGTGPGSSPSASTGTGPGASPGTSSTGSPGASPGTSSTGSPGSSTPSGATGSPGSSPSASTGTGPGASPGTSSTGSPGSSPSASTGTGPGTPGSGTASSSPGSSTPSGATGSPGSSTPSGATGSPGASPGTSSTGSPGMRSGCVVVHVWILAGLWLAVAGRPLAFSDAGPHVHYGWGDPIRLRHLYTSGPHGLSSCFLRIRADGVVDCARGQSAHSLLEIKAVALRTVAIKGVHSVRYLCMGADGKMQGLLQYSEEDCAFEEEIRPDGYNVYRSEKHRLPVSLSSAKQRQLYKNRGFLPLSHFLPMLPMVPEEPEDLRGHLESDMFSSPLETDSMDPFGLVTGLEAVRSPSFEK

SEQ ID NO: 876 - protein, 1092 aa, Artificial Sequence
  Description of Artificial Sequence: Synthetic polypeptide
GTSTEPSEGSAPGSEPATSGSETPGSPAGSPTSTEEGSTSSTAESPGPGTSTPESGSASPGSTSESPSGTAPGSTSESPSGTAPGTSTPESGSASPGTSTPESGSASPGSEPATSGSETPGTSESATPESGPGSPAGSPTSTEEGTSTEPSEGSAPGTSESATPESGPGTSTEPSEGSAPGTSTEPSEGSAPGSPAGSPTSTEEGTSTEPSEGSAPGTSTEPSEGSAPGTSESATPESGPGTSESATPESGPGTSTEPSEGSAPGTSTEPSEGSAPGTSESATPESGPGTSTEPSEGSAPGSEPATSGSETPGSPAGSPTSTEEGSSTPSGATGSPGTPGSGTASSSPGSSTPSGATGSPGTSTEPSEGSAPGTSTEPSEGSAPGSEPATSGSETPGSPAGSPTSTEEGSPAGSPTSTEEGTSTEPSEGSAPGASASGAPSTGGTSESATPESGPGSPAGSPTSTEEGSPAGSPTSTEEGSTSSTAESPGPGSTSESPSGTAPGTSPSGESSTAPGTPGSGTASSSPGSSTPSGATGSPGSSPSASTGTGPGSEPATSGSETPGTSESATPESGPGSEPATSGSETPGSTSSTAESPGPGSTSSTAESPGPGTSPSGESSTAPGSEPATSGSETPGSEPATSGSETPGTSTEPSEGSAPGSTSSTAESPGPGTSTPESGSASPGSTSESPSGTAPGTSTEPSEGSAPGTSTEPSEGSAPGTSTEPSEGSAPGSSTPSGATGSPGSSPSASTGTGPGASPGTSSTGSPGSEPATSGSETPGTSESATPESGPGSPAGSPTSTEEGSSTPSGATGSPGSSPSASTGTGPGASPGTSSTGSPGTSESATPESGPGTSTEPSEGSAPGTSTEPSEGSAPGMRSGCVVVHVWILAGLWLAVAGRPLAFSDAGPHVHYGWGDPIRLRHLYTSGPHGLSSCFLRIRADGVVDCARGQSAHSLLEIKAVALRTVAIKGVHSVRYLCMGADGKMQGLLQYSEEDCAFEEEIRPDGYNVYRSEKHRLPVSLSSAKQRQLYKNRGFLPLSHFLPMLPMVPEEPEDLRGHLESDMFSSPLETDSMDPFGLVTGLEAVRSPSFEK

SEQ ID NO: 877 - protein, 354 aa, Artificial Sequence
  Description of Artificial Sequence: Synthetic polypeptide
MDSDETGFEHSGLWVSVLAGLLLGACQAHPIPDSSPLLQFGGQVRQRYLYTDDAQQTEAHLEIREDGTVGGAADQSPESLLQLKALKPGVIQILGVKTSRFLCQRPDGALYGSLHFDPEACSFRELLLEDGYNVYQSEAHGLPLHLPGNKSPHRDPAPRGPARFLPLPGLPPALPEPPGILAPQPPDVGSSDPLSMVGPSQGRSPSYASGGSEPATSGSETPGTSESATPESGPGSEPATSGSETPGSPAGSPTSTEEGTSTEPSEGSAPGSEPATSGSETPGSEPATSGSETPGSEPATSGSETPGTSTEPSEGSAPGTSESATPESGPGSEPATSGSETPGTSTEPSEGSAP

SEQ ID NO: 878 - protein, 354 aa, Artificial Sequence
  Description of Artificial Sequence: Synthetic polypeptide
MDSDETGFEHSGLWVSVLAGLLLGACQAHPIPDSSPLLQFGGQVRQRYLYTDDAQQTEAHLEIREDGTVGGAADQSPESLLQLKALKPGVIQILGVKTSRFLCQRPDGALYGSLHFDPEACSFRELLLEDGYNVYQSEAHGLPLHLPGNKSPHRDPAPRGPARFLPLPGLPPALPEPPGILAPQPPDVGSSDPLSMVGPSQGRSPSYASGGTSTPESGSASPGTSPSGESSTAPGTSPSGESSTAPGSTSSTAESPGPGSTSESPSGTAPGSTSSTAESPGPGTSPSGESSTAPGTSTPESGSASPGSTSSTAESPGPGTSPSGESSTAPGTSPSGESSTAPGTSPSGESSTAP

SEQ ID NO: 879 - protein, 498 aa, Artificial Sequence
  Description of Artificial Sequence: Synthetic polypeptide
MDSDETGFEHSGLWVSVLAGLLLGACQAHPIPDSSPLLQFGGQVRQRYLYTDDAQQTEAHLEIREDGTVGGAADQSPESLLQLKALKPGVIQILGVKTSRFLCQRPDGALYGSLHFDPEACSFRELLLEDGYNVYQSEAHGLPLHLPGNKSPHRDPAPRGPARFLPLPGLPPALPEPPGILAPQPPDVGSSDPLSMVGPSQGRSPSYASGGTSESATPESGPGSEPATSGSETPGTSESATPESGPGSEPATSGSETPGTSESATPESGPGTSTEPSEGSAPGSPAGSPTSTEEGTSESATPESGPGSEPATSGSETPGTSESATPESGPGSPAGSPTSTEEGSPAGSPTSTEEGTSTEPSEGSAPGTSESATPESGPGTSESATPESGPGTSESATPESGPGSEPATSGSETPGSEPATSGSETPGSPAGSPTSTEEGTSTEPSEGSAPGTSTEPSEGSAPGSEPATSGSETPGTSESATPESGPGTSTEPSEGSAP

SEQ ID NO: 880 - protein, 786 aa, Artificial Sequence
  Description of Artificial Sequence: Synthetic polypeptide
MDSDETGFEHSGLWVSVLAGLLLGACQAHPIPDSSPLLQFGGQVRQRYLYTDDAQQTEAHLEIREDGTVGGAADQSPESLLQLKALKPGVIQILGVKTSRFLCQRPDGALYGSLHFDPEACSFRELLLEDGYNVYQSEAHGLPLHLPGNKSPHRDPAPRGPARFLPLPGLPPALPEPPGILAPQPPDVGSSDPLSMVGPSQGRSPSYASGGSPAGSPTSTEEGTSESATPESGPGTSTEPSEGSAPGSPAGSPTSTEEGTSTEPSEGSAPGTSTEPSEGSAPGTSESATPESGPGSEPATSGSETPGSEPATSGSETPGSPAGSPTSTEEGTSESATPESGPGTSTEPSEGSAPGTSTEPSEGSAPGSPAGSPTSTEEGTSTEPSEGSAPGTSTEPSEGSAPGTSESATPESGPGTSTEPSEGSAPGTSESATPESGPGSEPATSGSETPGTSTEPSEGSAPGTSTEPSEGSAPGTSESATPESGPGTSESATPESGPGSPAGSPTSTEEGTSESATPESGPGSEPATSGSETPGTSESATPESGPGTSTEPSEGSAPGTSTEPSEGSAPGTSTEPSEGSAPGTSTEPSEGSAPGTSTEPSEGSAPGTSTEPSEGSAPGSPAGSPTSTEEGTSTEPSEGSAPGTSESATPESGPGSEPATSGSETPGTSESATPESGPGSEPATSGSETPGTSESATPESGPGTSTEPSEGSAPGTSESATPESGPGSPAGSPTSTEEGSPAGSPTSTEEGSPAGSPTSTEEGTSESATPESGPGTSTEPSEGSAP

SEQ ID NO: 881 - protein, 786 aa, Artificial Sequence
  Description of Artificial Sequence: Synthetic polypeptide
MDSDETGFEHSGLWVSVLAGLLLGACQAHPIPDSSPLLQFGGQVRQRYLYTDDAQQTEAHLEIREDGTVGGAADQSPESLLQLKALKPGVIQILGVKTSRFLCQRPDGALYGSLHFDPEACSFRELLLEDGYNVYQSEAHGLPLHLPGNKSPHRDPAPRGPARFLPLPGLPPALPEPPGILAPQPPDVGSSDPLSMVGPSQGRSPSYASGGSTSSTAESPGPGSTSSTAESPGPGSTSESPSGTAPGSTSSTAESPGPGSTSSTAESPGPGTSTPESGSASPGSTSESPSGTAPGTSPSGESSTAPGSTSESPSGTAPGSTSESPSGTAPGTSPSGESSTAPGSTSESPSGTAPGSTSESPSGTAPGTSPSGESSTAPGSTSESPSGTAPGSTSESPSGTAPGSTSESPSGTAPGTSTPESGSASPGSTSESPSGTAPGTSTPESGSASPGSTSSTAESPGPGSTSSTAESPGPGTSTPESGSASPGTSTPESGSASPGSTSESPSGTAPGTSTPESGSASPGTSTPESGSASPGSTSESPSGTAPGSTSESPSGTAPGSTSESPSGTAPGSTSSTAESPGPGTSTPESGSASPGTSTPESGSASPGSTSESPSGTAPGSTSESPSGTAPGTSTPESGSASPGSTSESPSGTAPGSTSESPSGTAPGTSTPESGSASPGTSPSGESSTAPGSTSSTAESPGPGTSPSGESSTAPGSTSSTAESPGPGTSTPESGSASPGSTSESPSGTAPGSTSSTAESPGPGTSTPESGSASPGTSTPESGSASP

SEQ ID NO: 882 - protein, 1046 aa, Artificial Sequence
  Description of Artificial Sequence: Synthetic polypeptide
MDSDETGFEHSGLWVSVLAGLLLGACQAHPIPDSSPLLQFGGQVRQRYLYTDDAQQTEAHLEIREDGTVGGAADQSPESLLQLKALKPGVIQILGVKTSRFLCQRPDGALYGSLHFDPEACSFRELLLEDGYNVYQSEAHGLPLHLPGNKSPHRDPAPRGPARFLPLPGLPPALPEPPGILAPQPPDVGSSDPLSMVGPSQGRSPSYASGGSSESGSSEGGPGSSESGSSEGGPGESPGGSSGSESGSGGEPSESGSSGESPGGSSGSESGESPGGSSGSESGSSESGSSEGGPGSSESGSSEGGPGSSESGSSEGGPGESPGGSSGSESGESPGGSSGSESGESPGGSSGSESGSSESGSSEGGPGSSESGSSEGGPGSSESGSSEGGPGSSESGSSEGGPGSSESGSSEGGPGSSESGSSEGGPGSGGEPSESGSSGESPGGSSGSESGESPGGSSGSESGSGGEPSESGSSGSEGSSGPGESSGSSESGSSEGGPGSGGEPSESGSSGSEGSSGPGESSGSSESGSSEGGPGSGGEPSESGSSGESPGGSSGSESGSGGEPSESGSSGSGGEPSESGSSGSSESGSSEGGPGSGGEPSESGSSGSGGEPSESGSSGSEGSSGPGESSGESPGGSSGSESGSEGSSGPGESSGSEGSSGPGESSGSGGEPSESGSSGSSESGSSEGGPGSSESGSSEGGPGESPGGSSGSESGSGGEPSESGSSGSEGSSGPGESSGESPGGSSGSESGSEGSSGPGSSESGSSEGGPGSGGEPSESGSSGSEGSSGPGESSGSEGSSGPGESSGSEGSSGPGESSGSGGEPSESGSSGSGGEPSESGSSGESPGGSSGSESGESPGGSSGSESGSGGEPSESGSSGSEGSSGPGESSGESPGGSSGSESGSSESGSSEGGPGSSESGSSEGGPGSSESGSSEGGPGSGGEPSESGSSGSSESGSSEGGPGESPGGSSGSESGSGGEPSESGSSGSSESGSSEGGPGESPGGSSGSESGSGGEPSESGSSGESPGGSSGSESGSGGEPSESGSS

SEQ ID NO: 883 - protein, 1074 aa, Artificial Sequence
  Description of Artificial Sequence: Synthetic polypeptide
MDSDETGFEHSGLWVSVLAGLLLGACQAHPIPDSSPLLQFGGQVRQRYLYTDDAQQTEAHLEIREDGTVGGAADQSPESLLQLKALKPGVIQILGVKTSRFLCQRPDGALYGSLHFDPEACSFRELLLEDGYNVYQSEAHGLPLHLPGNKSPHRDPAPRGPARFLPLPGLPPALPEPPGILAPQPPDVGSSDPLSMVGPSQGRSPSYASGGSPAGSPTSTEEGTSESATPESGPGTSTEPSEGSAPGSPAGSPTSTEEGTSTEPSEGSAPGTSTEPSEGSAPGTSESATPESGPGSEPATSGSETPGSEPATSGSETPGSPAGSPTSTEEGTSESATPESGPGTSTEPSEGSAPGTSTEPSEGSAPGSPAGSPTSTEEGTSTEPSEGSAPGTSTEPSEGSAPGTSESATPESGPGTSTEPSEGSAPGTSESATPESGPGSEPATSGSETPGTSTEPSEGSAPGTSTEPSEGSAPGTSESATPESGPGTSESATPESGPGSPAGSPTSTEEGTSESATPESGPGSEPATSGSETPGTSESATPESGPGTSTEPSEGSAPGTSTEPSEGSAPGTSTEPSEGSAPGTSTEPSEGSAPGTSTEPSEGSAPGTSTEPSEGSAPGSPAGSPTSTEEGTSTEPSEGSAPGTSESATPESGPGSEPATSGSETPGTSESATPESGPGSEPATSGSETPGTSESATPESGPGTSTEPSEGSAPGTSESATPESGPGSPAGSPTSTEEGSPAGSPTSTEEGSPAGSPTSTEEGTSESATPESGPGTSTEPSEGSAPGTSESATPESGPGSEPATSGSETPGTSESATPESGPGSEPATSGSETPGTSESATPESGPGTSTEPSEGSAPGSPAGSPTSTEEGTSESATPESGPGSEPATSGSETPGTSESATPESGPGSPAGSPTSTEEGSPAGSPTSTEEGTSTEPSEGSAPGTSESATPESGPGTSESATPESGPGTSESATPESGPGSEPATSGSETPGSEPATSGSETPGSPAGSPTSTEEGTSTEPSEGSAPGTSTEPSEGSAPGSEPATSGSETPGTSESATPESGPGTSTEPSEGSAP

SEQ ID NO: 884 - protein, 1085 aa, Artificial Sequence
  Description of Artificial Sequence: Synthetic polypeptide
  MOD_RES (640)..(642): Any amino acid
  MOD_RES (653)..(656): Any amino acid
MDSDETGFEHSGLWVSVLAGLLLGACQAHPIPDSSPLLQFGGQVRQRYLYTDDAQQTEAHLEIREDGTVGGAADQSPESLLQLKALKPGVIQILGVKTSRFLCQRPDGALYGSLHFDPEACSFRELLLEDGYNVYQSEAHGLPLHLPGNKSPHRDPAPRGPARFLPLPGLPPALPEPPGILAPQPPDVGSSDPLSMVGPSQGRSPSYASGGSTSESPSGTAPGTSPSGESSTAPGSTSESPSGTAPGSTSESPSGTAPGTSTPESGSASPGTSTPESGSASPGSTSESPSGTAPGSTSESPSGTAPGTSPSGESSTAPGSTSESPSGTAPGTSPSGESSTAPGTSPSGESSTAPGSTSSTAESPGPGTSPSGESSTAPGTSPSGESSTAPGSTSSTAESPGPGTSTPESGSASPGTSTPESGSASPGSTSESPSGTAPGSTSESPSGTAPGTSTPESGSASPGSTSSTAESPGPGTSTPESGSASPGSTSESPSGTAPGTSPSGESSTAPGSTSSTAESPGPGTSPSGESSTAPGTSTPESGSASPGSTSSTAESPGPGSTSSTAESPGPGSTSSTAESPGPGSTSSTAESPGPGTSPSGESSTAPGSTSESPSGTAPGSTSESPSGTAPGTSTPESGPXXXGASASGAPSTXXXXSESPSGTAPGSTSESPSGTAPGSTSESPSGTAPGSTSESPSGTAPGSTSESPSGTAPGSTSESPSGTAPGTSTPESGSASPGTSPSGESSTAPGTSPSGESSTAPGSTSSTAESPGPGTSPSGESSTAPGTSTPESGSASPGSTSESPSGTAPGSTSESPSGTAPGTSPSGESSTAPGSTSESPSGTAPGTSTPESGSASPGTSTPESGSASPGSTSESPSGTAPGTSTPESGSASPGSTSSTAESPGPGSTSESPSGTAPGSTSESPSGTAPGTSPSGESSTAPGSTSSTAESPGPGTSPSGESSTAPGTSTPESGSASPGTSPSGESSTAPGTSPSGESSTAPGTSPSGESSTAPGSTSSTAESPGPGSTSSTAESPGPGTSPSGESSTAPGSSPSASTGTGPGSSTPSGATGSPGSSTPSGATGSP

SEQ ID NO: 885 - protein, 1074 aa, Artificial Sequence
  Description of Artificial Sequence: Synthetic polypeptide
MDSDETGFEHSGLWVSVLAGLLLGACQAHPIPDSSPLLQFGGQVRQRYLYTDDAQQTEAHLEIREDGTVGGAADQSPESLLQLKALKPGVIQILGVKTSRFLCQRPDGALYGSLHFDPEACSFRELLLEDGYNVYQSEAHGLPLHLPGNKSPHRDPAPRGPARFLPLPGLPPALPEPPGILAPQPPDVGSSDPLSMVGPSQGRSPSYASGGASPGTSSTGSPGSSPSASTGTGPGSSPSASTGTGPGTPGSGTASSSPGSSTPSGATGSPGSNPSASTGTGPGASPGTSSTGSPGTPGSGTASSSPGSSTPSGATGSPGTPGSGTASSSPGASPGTSSTGSPGASPGTSSTGSPGTPGSGTASSSPGSSTPSGATGSPGASPGTSSTGSPGTPGSGTASSSPGSSTPSGATGSPGSNPSASTGTGPGSSPSASTGTGPGSSTPSGATGSPGSSTPSGATGSPGASPGTSSTGSPGASPGTSSTGSPGASPGTSSTGSPGTPGSGTASSSPGASPGTSSTGSPGASPGTSSTGSPGASPGTSSTGSPGSSPSASTGTGPGTPGSGTASSSPGASPGTSSTGSPGASPGTSSTGSPGASPGTSSTGSPGSSTPSGATGSPGSSTPSGATGSPGASPGTSSTGSPGTPGSGTASSSPGSSTPSGATGSPGSSTPSGATGSPGSSTPSGATGSPGSSPSASTGTGPGASPGTSSTGSPGASPGTSSTGSPGTPGSGTASSSPGASPGTSSTGSPGASPGTSSTGSPGASPGTSSTGSPGASPGTSSTGSPGTPGSGTASSSPGSSTPSGATGSPGTPGSGTASSSPGSSTPSGATGSPGTPGSGTASSSPGSSTPSGATGSPGSSTPSGATGSPGSSPSASTGTGPGSSPSASTGTGPGASPGTSSTGSPGTPGSGTASSSPGSSTPSGATGSPGSSPSASTGTGPGSSPSASTGTGPGASPGTSSTGSPGASPGTSSTGSPGSSTPSGATGSPGSSPSASTGTGPGASPGTSSTGSPGSSPSASTGTGPGTPGSGTASSSPGSSTPSGATGSPGSSTPSGATGSPGASPGTSSTGSP

SEQ ID NO: 886 - protein, 1085 aa, Artificial Sequence
  Description of Artificial Sequence: Synthetic polypeptide
MDSDETGFEHSGLWVSVLAGLLLGACQAHPIPDSSPLLQFGGQVRQRYLYTDDAQQTEAHLEIREDGTVGGAADQSPESLLQLKALKPGVIQILGVKTSRFLCQRPDGALYGSLHFDPEACSFRELLLEDGYNVYQSEAHGLPLHLPGNKSPHRDPAPRGPARFLPLPGLPPALPEPPGILAPQPPDVGSSDPLSMVGPSQGRSPSYASGGTSTEPSEGSAPGSEPATSGSETPGSPAGSPTSTEEGSTSSTAESPGPGTSTPESGSASPGSTSESPSGTAPGSTSESPSGTAPGTSTPESGSASPGTSTPESGSASPGSEPATSGSETPGTSESATPESGPGSPAGSPTSTEEGTSTEPSEGSAPGTSESATPESGPGTSTEPSEGSAPGTSTEPSEGSAPGSPAGSPTSTEEGTSTEPSEGSAPGTSTEPSEGSAPGTSESATPESGPGTSESATPESGPGTSTEPSEGSAPGTSTEPSEGSAPGTSESATPESGPGTSTEPSEGSAPGSEPATSGSETPGSPAGSPTSTEEGSSTPSGATGSPGTPGSGTASSSPGSSTPSGATGSPGTSTEPSEGSAPGTSTEPSEGSAPGSEPATSGSETPGSPAGSPTSTEEGSPAGSPTSTEEGTSTEPSEGSAPGASASGAPSTGGTSESATPESGPGSPAGSPTSTEEGSPAGSPTSTEEGSTSSTAESPGPGSTSESPSGTAPGTSPSGESSTAPGTPGSGTASSSPGSSTPSGATGSPGSSPSASTGTGPGSEPATSGSETPGTSESATPESGPGSEPATSGSETPGSTSSTAESPGPGSTSSTAESPGPGTSPSGESSTAPGSEPATSGSETPGSEPATSGSETPGTSTEPSEGSAPGSTSSTAESPGPGTSTPESGSASPGSTSESPSGTAPGTSTEPSEGSAPGTSTEPSEGSAPGTSTEPSEGSAPGSSTPSGATGSPGSSPSASTGTGPGASPGTSSTGSPGSEPATSGSETPGTSESATPESGPGSPAGSPTSTEEGSSTPSGATGSPGSSPSASTGTGPGASPGTSSTGSPGTSESATPESGPGTSTEPSEGSAPGTSTEPSEGSAP

SEQ ID NO: 887 - protein, 1528 aa, Artificial Sequence
  Description of Artificial Sequence: Synthetic polypeptide
MDSDETGFEHSGLWVSVLAGLLLGACQAHPIPDSSPLLQFGGQVRQRYLYTDDAQQTEAHLEIREDGTVGGAADQSPESLLQLKALKPGVIQILGVKTSRFLCQRPDGALYGSLHFDPEACSFRELLLEDGYNVYQSEAHGLPLHLPGNKSPHRDPAPRGPARFLPLPGLPPALPEPPGILAPQPPDVGSSDPLSMVGPSQGRSPSYASGGTSTEPSEGSAPGSEPATSGSETPGSPAGSPTSTEEGSTSSTAESPGPGTSTPESGSASPGSTSESPSGTAPGSTSESPSGTAPGTSTPESGSASPGTSTPESGSASPGSEPATSGSETPGTSESATPESGPGSPAGSPTSTEEGTSTEPSEGSAPGTSESATPESGPGTSTEPSEGSAPGTSTEPSEGSAPGSPAGSPTSTEEGTSTEPSEGSAPGTSTEPSEGSAPGTSESATPESGPGTSESATPESGPGTSTEPSEGSAPGTSTEPSEGSAPGTSESATPESGPGTSTEPSEGSAPGSEPATSGSETPGSPAGSPTSTEEGSSTPSGATGSPGTPGSGTASSSPGSSTPSGATGSPGTSTEPSEGSAPGTSTEPSEGSAPGSEPATSGSETPGSPAGSPTSTEEGSPAGSPTSTEEGTSTEPSEGSAPGPEPTGPAPSGGSEPATSGSETPGTSESATPESGPGSPAGSPTSTEEGTSESATPESGPGSPAGSPTSTEEGSPAGSPTSTEEGTSESATPESGPGSPAGSPTSTEEGSPAGSPTSTEEGSTSSTAESPGPGSTSESPSGTAPGTSPSGESSTAPGSTSESPSGTAPGSTSESPSGTAPGTSPSGESSTAPGTSTEPSEGSAPGTSESATPESGPGTSESATPESGPGSEPATSGSETPGTSESATPESGPGTSESATPESGPGTSTEPSEGSAPGTSESATPESGPGTSTEPSEGSAPGTSPSGESSTAPGTSPSGESSTAPGTSPSGESSTAPGTSTEPSEGSAPGSPAGSPTSTEEGTSTEPSEGSAPGSSPSASTGTGPGSSTPSGATGSPGSSTPSGATGSPGSSTPSGATGSPGSSTPSGATGSPGASPGTSSTGSPGASASGAPSTGGTSPSGESSTAPGSTSSTAESPGPGTSPSGESSTAPGTSESATPESGPGTSTEPSEGSAPGTSTEPSEGSAPGSSPSASTGTGPGSSTPSGATGSPGASPGTSSTGSPGTSTPESGSASPGTSPSGESSTAPGTSPSGESSTAPGTSESATPESGPGSEPATSGSETPGTSTEPSEGSAPGSTSESPSGTAPGSTSESPSGTAPGTSTPESGSASPGSPAGSPTSTEEGTSESATPESGPGTSTEPSEGSAPGSPAGSPTSTEEGTSESATPESGPGSEPATSGSETPGSSTPSGATGSPGASPGTSSTGSPGSSTPSGATGSPGSTSESPSGTAPGTSPSGESSTAPGSTSSTAESPGPGSSTPSGATGSPGASPGTSSTGSPGTPGSGTASSSPGSPAGSPTSTEEGSPAGSPTSTEEGTSTEPSEGSAP

SEQ ID NO: 888 - protein, 354 aa, Artificial Sequence; identical to SEQ ID NO: 877
  Description of Artificial Sequence: Synthetic polypeptide

SEQ ID NO: 889 - protein, 1123 aa, Artificial Sequence
  Description of Artificial Sequence: Synthetic polypeptide
MAEPAGSPTSTEEGTPGSGTASSSPGSSTPSGATGSPGASPGTSSTGSPGSPAGSPTSTEEGTSESATPESGPGTSTEPSEGSAPGSPAGSPTSTEEGTSTEPSEGSAPGTSTEPSEGSAPGTSESATPESGPGSEPATSGSETPGSEPATSGSETPGSPAGSPTSTEEGTSESATPESGPGTSTEPSEGSAPGTSTEPSEGSAPGSPAGSPTSTEEGTSTEPSEGSAPGTSTEPSEGSAPGTSESATPESGPGTSTEPSEGSAPGTSESATPESGPGSEPATSGSETPGTSTEPSEGSAPGTSTEPSEGSAPGTSESATPESGPGTSESATPESGPGSPAGSPTSTEEGTSESATPESGPGSEPATSGSETPGTSESATPESGPGTSTEPSEGSAPGTSTEPSEGSAPGTSTEPSEGSAPGTSTEPSEGSAPGTSTEPSEGSAPGTSTEPSEGSAPGSPAGSPTSTEEGTSTEPSEGSAPGTSESATPESGPGSEPATSGSETPGTSESATPESGPGSEPATSGSETPGTSESATPESGPGTSTEPSEGSAPGTSESATPESGPGSPAGSPTSTEEGSPAGSPTSTEEGSPAGSPTSTEEGTSESATPESGPGTSTEPSEGSAPGTSESATPESGPGSEPATSGSETPGTSESATPESGPGSEPATSGSETPGTSESATPESGPGTSTEPSEGSAPGSPAGSPTSTEEGTSESATPESGPGSEPATSGSETPGTSESATPESGPGSPAGSPTSTEEGSPAGSPTSTEEGTSTEPSEGSAPGTSESATPESGPGTSESATPESGPGTSESATPESGPGSEPATSGSETPGSEPATSGSETPGSPAGSPTSTEEGTSTEPSEGSAPGTSTEPSEGSAPGSEPATSGSETPGTSESATPESGPGTSTEPSEGSAPGMDSDETGFEHSGLWVSVLAGLLLGACQAHPIPDSSPLLQFGGQVRQRYLYTDDAQQTEAHLEIREDGTVGGAADQSPESLLQLKALKPGVIQILGVKTSRFLCQRPDGALYGSLHFDPEACSFRELLLEDGYNVYQSEAHGLPLHLPGNKSPHRDPAPRGPARFLPLPGLPPALPEPPGILAPQPPDVGSSDPLSMVGPSQGRSPSYAS

SEQ ID NO: 890 - protein, 1134 aa, Artificial Sequence
  Description of Artificial Sequence: Synthetic polypeptide
MAEPAGSPTSTEEGASPGTSSTGSPGSSTPSGATGSPGSSTPSGATGSPGTSTEPSEGSAPGSEPATSGSETPGSPAGSPTSTEEGSTSSTAESPGPGTSTPESGSASPGSTSESPSGTAPGSTSESPSGTAPGTSTPESGSASPGTSTPESGSASPGSEPATSGSETPGTSESATPESGPGSPAGSPTSTEEGTSTEPSEGSAPGTSESATPESGPGTSTEPSEGSAPGTSTEPSEGSAPGSPAGSPTSTEEGTSTEPSEGSAPGTSTEPSEGSAPGTSESATPESGPGTSESATPESGPGTSTEPSEGSAPGTSTEPSEGSAPGTSESATPESGPGTSTEPSEGSAPGSEPATSGSETPGSPAGSPTSTEEGSSTPSGATGSPGTPGSGTASSSPGSSTPSGATGSPGTSTEPSEGSAPGTSTEPSEGSAPGSEPATSGSETPGSPAGSPTSTEEGSPAGSPTSTEEGTSTEPSEGSAPGASASGAPSTGGTSESATPESGPGSPAGSPTSTEEGSPAGSPTSTEEGSTSSTAESPGPGSTSESPSGTAPGTSPSGESSTAPGTPGSGTASSSPGSSTPSGATGSPGSSPSASTGTGPGSEPATSGSETPGTSESATPESGPGSEPATSGSETPGSTSSTAESPGPGSTSSTAESPGPGTSPSGESSTAPGSEPATSGSETPGSEPATSGSETPGTSTEPSEGSAPGSTSSTAESPGPGTSTPESGSASPGSTSESPSGTAPGTSTEPSEGSAPGTSTEPSEGSAPGTSTEPSEGSAPGSSTPSGATGSPGSSPSASTGTGPGASPGTSSTGSPGSEPATSGSETPGTSESATPESGPGSPAGSPTSTEEGSSTPSGATGSPGSSPSASTGTGPGASPGTSSTGSPGTSESATPESGPGTSTEPSEGSAPGTSTEPSEGSAPGMDSDETGFEHSGLWVSVLAGLLLGACQAHPIPDSSPLLQFGGQVRQRYLYTDDAQQTEAHLEIREDGTVGGAADQSPESLLQLKALKPGVIQILGVKTSRFLCQRPDGALYGSLHFDPEACSFRELLLEDGYNVYQSEAHGLPLHLPGNKSPHRDPAPRGPARFLPLPGLPPALPEPPGILAPQPPDVGSSDPLSMVGPSQGRSPSYAS

SEQ ID NO: 891 - protein, 354 aa, Artificial Sequence
  Description of Artificial Sequence: Synthetic polypeptide
GSEPATSGSETPGTSESATPESGPGSEPATSGSETPGSPAGSPTSTEEGTSTEPSEGSAPGSEPATSGSETPGSEPATSGSETPGSEPATSGSETPGTSTEPSEGSAPGTSESATPESGPGSEPATSGSETPGTSTEPSEGSAPGMDSDETGFEHSGLWVSVLAGLLLGACQAHPIPDSSPLLQFGGQVRQRYLYTDDAQQTEAHLEIREDGTVGGAADQSPESLLQLKALKPGVIQILGVKTSRFLCQRPDGALYGSLHFDPEACSFRELLLEDGYNVYQSEAHGLPLHLPGNKSPHRDPAPRGPARFLPLPGLPPALPEPPGILAPQPPDVGSSDPLSMVGPSQGRSPSYAS

SEQ ID NO: 892 - protein, 354 aa, Artificial Sequence
  Description of Artificial Sequence: Synthetic polypeptide
GTSTPESGSASPGTSPSGESSTAPGTSPSGESSTAPGSTSSTAESPGPGSTSESPSGTAPGSTSSTAESPGPGTSPSGESSTAPGTSTPESGSASPGSTSSTAESPGPGTSPSGESSTAPGTSPSGESSTAPGTSPSGESSTAPGMDSDETGFEHSGLWVSVLAGLLLGACQAHPIPDSSPLLQFGGQVRQRYLYTDDAQQTEAHLEIREDGTVGGAADQSPESLLQLKALKPGVIQILGVKTSRFLCQRPDGALYGSLHFDPEACSFRELLLEDGYNVYQSEAHGLPLHLPGNKSPHRDPAPRGPARFLPLPGLPPALPEPPGILAPQPPDVGSSDPLSMVGPSQGRSPSYAS

SEQ ID NO: 893 - protein, 498 aa, Artificial Sequence
  Description of Artificial Sequence: Synthetic polypeptide
GTSESATPESGPGSEPATSGSETPGTSESATPESGPGSEPATSGSETPGTSESATPESGPGTSTEPSEGSAPGSPAGSPTSTEEGTSESATPESGPGSEPATSGSETPGTSESATPESGPGSPAGSPTSTEEGSPAGSPTSTEEGTSTEPSEGSAPGTSESATPESGPGTSESATPESGPGTSESATPESGPGSEPATSGSETPGSEPATSGSETPGSPAGSPTSTEEGTSTEPSEGSAPGTSTEPSEGSAPGSEPATSGSETPGTSESATPESGPGTSTEPSEGSAPGMDSDETGFEHSGLWVSVLAGLLLGACQAHPIPDSSPLLQFGGQVRQRYLYTDDAQQTEAHLEIREDGTVGGAADQSPESLLQLKALKPGVIQILGVKTSRFLCQRPDGALYGSLHFDPEACSFRELLLEDGYNVYQSEAHGLPLHLPGNKSPHRDPAPRGPARFLPLPGLPPALPEPPGILAPQPPDVGSSDPLSMVGPSQGRSPSYAS

SEQ ID NO: 894 - protein, 786 aa, Artificial Sequence
  Description of Artificial Sequence: Synthetic polypeptide
GSPAGSPTSTEEGTSESATPESGPGTSTEPSEGSAPGSPAGSPTSTEEGTSTEPSEGSAPGTSTEPSEGSAPGTSESATPESGPGSEPATSGSETPGSEPATSGSETPGSPAGSPTSTEEGTSESATPESGPGTSTEPSEGSAPGTSTEPSEGSAPGSPAGSPTSTEEGTSTEPSEGSAPGTSTEPSEGSAPGTSESATPESGPGTSTEPSEGSAPGTSESATPESGPGSEPATSGSETPGTSTEPSEGSAPGTSTEPSEGSAPGTSESATPESGPGTSESATPESGPGSPAGSPTSTEEGTSESATPESGPGSEPATSGSETPGTSESATPESGPGTSTEPSEGSAPGTSTEPSEGSAPGTSTEPSEGSAPGTSTEPSEGSAPGTSTEPSEGSAPGTSTEPSEGSAPGSPAGSPTSTEEGTSTEPSEGSAPGTSESATPESGPGSEPATSGSETPGTSESATPESGPGSEPATSGSETPGTSESATPESGPGTSTEPSEGSAPGTSESATPESGPGSPAGSPTSTEEGSPAGSPTSTEEGSPAGSPTSTEEGTSESATPESGPGTSTEPSEGSAPGMDSDETGFEHSGLWVSVLAGLLLGACQAHPIPDSSPLLQFGGQVRQRYLYTDDAQQTEAHLEIREDGTVGGAADQSPESLLQLKALKPGVIQILGVKTSRFLCQRPDGALYGSLHFDPEACSFRELLLEDGYNVYQSEAHGLPLHLPGNKSPHRDPAPRGPARFLPLPGLPPALPEPPGILAPQPPDVGSSDPLSMVGPSQGRSPSYAS

SEQ ID NO: 895 - protein, 786 aa, Artificial Sequence
  Description of Artificial Sequence: Synthetic polypeptide
GSTSSTAESPGPGSTSSTAESPGPGSTSESPSGTAPGSTSSTAESPGPGSTSSTAESPGPGTSTPESGSASPGSTSESPSGTAPGTSPSGESSTAPGSTSESPSGTAPGSTSESPSGTAPGTSPSGESSTAPGSTSESPSGTAPGSTSESPSGTAPGTSPSGESSTAPGSTSESPSGTAPGSTSESPSGTAPGSTSESPSGTAPGTSTPESGSASPGSTSESPSGTAPGTSTPESGSASPGSTSSTAESPGPGSTSSTAESPGPGTSTPESGSASPGTSTPESGSASPGSTSESPSGTAPGTSTPESGSASPGTSTPESGSASPGSTSESPSGTAPGSTSESPSGTAPGSTSESPSGTAPGSTSSTAESPGPGTSTPESGSASPGTSTPESGSASPGSTSESPSGTAPGSTSESPSGTAPGTSTPESGSASPGSTSESPSGTAPGSTSESPSGTAPGTSTPESGSASPGTSPSGESSTAPGSTSSTAESPGPGTSPSGESSTAPGSTSSTAESPGPGTSTPESGSASPGSTSESPSGTAPGSTSSTAESPGPGTSTPESGSASPGTSTPESGSASPGMDSDETGFEHSGLWVSVLAGLLLGACQAHPIPDSSPLLQFGGQVRQRYLYTDDAQQTEAHLEIREDGTVGGAADQSPESLLQLKALKPGVIQILGVKTSRFLCQRPDGALYGSLHFDPEACSFRELLLEDGYNVYQSEAHGLPLHLPGNKSPHRDPAPRGPARFLPLPGLPPALPEPPGILAPQPPDVGSSDPLSMVGPSQGRSPSYAS

SEQ ID NO: 896 - protein, 1046 aa, Artificial Sequence
  Description of Artificial Sequence: Synthetic polypeptide
GSSESGSSEGGPGSSESGSSEGGPGESPGGSSGSESGSGGEPSESGSSGESPGGSSGSESGESPGGSSGSESGSSESGSSEGGPGSSESGSSEGGPGSSESGSSEGGPGESPGGSSGSESGESPGGSSGSESGESPGGSSGSESGSSESGSSEGGPGSSESGSSEGGPGSSESGSSEGGPGSSESGSSEGGPGSSESGSSEGGPGSSESGSSEGGPGSGGEPSESGSSGESPGGSSGSESGESPGGSSGSESGSGGEPSESGSSGSEGSSGPGESSGSSESGSSEGGPGSGGEPSESGSSGSEGSSGPGESSGSSESGSSEGGPGSGGEPSESGSSGESPGGSSGSESGSGGEPSESGSSGSGGEPSESGSSGSSESGSSEGGPGSGGEPSESGSSGSGGEPSESGSSGSEGSSGPGESSGESPGGSSGSESGSEGSSGPGESSGSEGSSGPGESSGSGGEPSESGSSGSSESGSSEGGPGSSESGSSEGGPGESPGGSSGSESGSGGEPSESGSSGSEGSSGPGESSGESPGGSSGSESGSEGSSGPGSSESGSSEGGPGSGGEPSESGSSGSEGSSGPGESSGSEGSSGPGESSGSEGSSGPGESSGSGGEPSESGSSGSGGEPSESGSSGESPGGSSGSESGESPGGSSGSESGSGGEPSESGSSGSEGSSGPGESSGESPGGSSGSESGSSESGSSEGGPGSSESGSSEGGPGSSESGSSEGGPGSGGEPSESGSSGSSESGSSEGGPGESPGGSSGSESGSGGEPSESGSSGSSESGSSEGGPGESPGGSSGSESGSGGEPSESGSSGESPGGSSGSESGSGGEPSESGSSGMDSDETGFEHSGLWVSVLAGLLLGACQAHPIPDSSPLLQFGGQVRQRYLYTDDAQQTEAHLEIREDGTVGGAADQSPESLLQLKALKPGVIQILGVKTSRFLCQRPDGALYGSLHFDPEACSFRELLLEDGYNVYQSEAHGLPLHLPGNKSPHRDPAPRGPARFLPLPGLPPALPEPPGILAPQPPDVGSSDPLSMVGPSQGRSPSYAS

SEQ ID NO: 897 - protein, 1074 aa, Artificial Sequence
  Description of Artificial Sequence: Synthetic polypeptide
GSPAGSPTSTEEGTSESATPESGPGTSTEPSEGSAPGSPAGSPTSTEEGTSTEPSEGSAPGTSTEPSEGSAPGTSESATPESGPGSEPATSGSETPGSEPATSGSETPGSPAGSPTSTEEGTSESATPESGPGTSTEPSEGSAPGTSTEPSEGSAPGSPAGSPTSTEEGTSTEPSEGSAPGTSTEPSEGSAPGTSESATPESGPGTSTEPSEGSAPGTSESATPESGPGSEPATSGSETPGTSTEPSEGSAPGTSTEPSEGSAPGTSESATPESGPGTSESATPESGPGSPAGSPTSTEEGTSESATPESGPGSEPATSGSETPGTSESATPESGPGTSTEPSEGSAPGTSTEPSEGSAPGTSTEPSEGSAPGTSTEPSEGSAPGTSTEPSEGSAPGTSTEPSEGSAPGSPAGSPTSTEEGTSTEPSEGSAPGTSESATPESGPGSEPATSGSETPGTSESATPESGPGSEPATSGSETPGTSESATPESGPGTSTEPSEGSAPGTSESATPESGPGSPAGSPTSTEEGSPAGSPTSTEEGSPAGSPTSTEEGTSESATPESGPGTSTEPSEGSAPGTSESATPESGPGSEPATSGSETPGTSESATPESGPGSEPATSGSETPGTSESATPESGPGTSTEPSEGSAPGSPAGSPTSTEEGTSESATPESGPGSEPATSGSETPGTSESATPESGPGSPAGSPTSTEEGSPAGSPTSTEEGTSTEPSEGSAPGTSESATPESGPGTSESATPESGPGTSESATPESGPGSEPATSGSETPGSEPATSGSETPGSPAGSPTSTEEGTSTEPSEGSAPGTSTEPSEGSAPGSEPATSGSETPGTSESATPESGPGTSTEPSEGSAPGMDSDETGFEHSGLWVSVLAGLLLGACQAHPIPDSSPLLQFGGQVRQRYLYTDDAQQTEAHLEIREDGTVGGAADQSPESLLQLKALKPGVIQILGVKTSRFLCQRPDGALYGSLHFDPEACSFRELLLEDGYNVYQSEAHGLPLHLPGNKSPHRDPAPRGPARFLPLPGLPPALPEPPGILAPQPPDVGSSDPLSMVGPSQGRSPSYAS

SEQ ID NO: 898 - protein, 1085 aa, Artificial Sequence
  Description of Artificial Sequence: Synthetic polypeptide
  MOD_RES (430)..(432): Any amino acid
  MOD_RES (443)..(446): Any amino acid
GSTSESPSGTAPGTSPSGESSTAPGSTSESPSGTAPGSTSESPSGTAPGTSTPESGSASPGTSTPESGSASPGSTSESPSGTAPGSTSESPSGTAPGTSPSGESSTAPGSTSESPSGTAPGTSPSGESSTAPGTSPSGESSTAPGSTSSTAESPGPGTSPSGESSTAPGTSPSGESSTAPGSTSSTAESPGPGTSTPESGSASPGTSTPESGSASPGSTSESPSGTAPGSTSESPSGTAPGTSTPESGSASPGSTSSTAESPGPGTSTPESGSASPGSTSESPSGTAPGTSPSGESSTAPGSTSSTAESPGPGTSPSGESSTAPGTSTPESGSASPGSTSSTAESPGPGSTSSTAESPGPGSTSSTAESPGPGSTSSTAESPGPGTSPSGESSTAPGSTSESPSGTAPGSTSESPSGTAPGTSTPESGPXXXGASASGAPSTXXXXSESPSGTAPGSTSESPSGTAPGSTSESPSGTAPGSTSESPSGTAPGSTSESPSGTAPGSTSESPSGTAPGTSTPESGSASPGTSPSGESSTAPGTSPSGESSTAPGSTSSTAESPGPGTSPSGESSTAPGTSTPESGSASPGSTSESPSGTAPGSTSESPSGTAPGTSPSGESSTAPGSTSESPSGTAPGTSTPESGSASPGTSTPESGSASPGSTSESPSGTAPGTSTPESGSASPGSTSSTAESPGPGSTSESPSGTAPGSTSESPSGTAPGTSPSGESSTAPGSTSSTAESPGPGTSPSGESSTAPGTSTPESGSASPGTSPSGESSTAPGTSPSGESSTAPGTSPSGESSTAPGSTSSTAESPGPGSTSSTAESPGPGTSPSGESSTAPGSSPSASTGTGPGSSTPSGATGSPGSSTPSGATGSPGMDSDETGFEHSGLWVSVLAGLLLGACQAHPIPDSSPLLQFGGQVRQRYLYTDDAQQTEAHLEIREDGTVGGAADQSPESLLQLKALKPGVIQILGVKTSRFLCQRPDGALYGSLHFDPEACSFRELLLEDGYNVYQSEAHGLPLHLPGNKSPHRDPAPRGPARFLPLPGLPPALPEPPGILAPQPPDVGSSDPLSMVGPSQGRSPSYAS

SEQ ID NO: 899 - protein, 1074 aa, Artificial Sequence
  Description of Artificial Sequence: Synthetic polypeptide
GASPGTSSTGSPGSSPSASTGTGPGSSPSASTGTGPGTPGSGTASSSPGSSTPSGATGSPGSNPSASTGTGPGASPGTSSTGSPGTPGSGTASSSPGSSTPSGATGSPGTPGSGTASSSPGASPGTSSTGSPGASPGTSSTGSPGTPGSGTASSSPGSSTPSGATGSPGASPGTSSTGSPGTPGSGTASSSPGSSTPSGATGSPGSNPSASTGTGPGSSPSASTGTGPGSSTPSGATGSPGSSTPSGATGSPGASPGTSSTGSPGASPGTSSTGSPGASPGTSSTGSPGTPGSGTASSSPGASPGTSSTGSPGASPGTSSTGSPGASPGTSSTGSPGSSPSASTGTGPGTPGSGTASSSPGASPGTSSTGSPGASPGTSSTGSPGASPGTSSTGSPGSSTPSGATGSPGSSTPSGATGSPGASPGTSSTGSPGTPGSGTASSSPGSSTPSGATGSPGSSTPSGATGSPGSSTPSGATGSPGSSPSASTGTGPGASPGTSSTGSPGASPGTSSTGSPGTPGSGTASSSPGASPGTSSTGSPGASPGTSSTGSPGASPGTSSTGSPGASPGTSSTGSPGTPGSGTASSSPGSSTPSGATGSPGTPGSGTASSSPGSSTPSGATGSPGTPGSGTASSSPGSSTPSGATGSPGSSTPSGATGSPGSSPSASTGTGPGSSPSASTGTGPGASPGTSSTGSPGTPGSGTASSSPGSSTPSGATGSPGSSPSASTGTGPGSSPSASTGTGPGASPGTSSTGSPGASPGTSSTGSPGSSTPSGATGSPGSSPSASTGTGPGASPGTSSTGSPGSSPSASTGTGPGTPGSGTASSSPGSSTPSGATGSPGSSTPSGATGSPGASPGTSSTGSPGMDSDETGFEHSGLWVSVLAGLLLGACQAHPIPDSSPLLQFGGQVRQRYLYTDDAQQTEAHLEIREDGTVGGAADQSPESLLQLKALKPGVIQILGVKTSRFLCQRPDGALYGSLHFDPEACSFRELLLEDGYNVYQSEAHGLPLHLPGNKSPHRDPAPRGPARFLPLPGLPPALPEPPGILAPQPPDVGSSDPLSMVGPSQGRSPSYAS

SEQ ID NO: 900 - protein, 1085 aa, Artificial Sequence
  Description of Artificial Sequence: Synthetic polypeptide
GTSTEPSEGSAPGSEPATSGSETPGSPAGSPTSTEEGSTSSTAESPGPGTSTPESGSASPGSTSESPSGTAPGSTSESPSGTAPGTSTPESGSASPGTSTPESGSASPGSEPATSGSETPGTSESATPESGPGSPAGSPTSTEEGTSTEPSEGSAPGTSESATPESGPGTSTEPSEGSAPGTSTEPSEGSAPGSPAGSPTSTEEGTSTEPSEGSAPGTSTEPSEGSAPGTSESATPESGPGTSESATPESGPGTSTEPSEGSAPGTSTEPSEGSAPGTSESATPESGPGTSTEPSEGSAPGSEPATSGSETPGSPAGSPTSTEEGSSTPSGATGSPGTPGSGTASSSPGSSTPSGATGSPGTSTEPSEGSAPGTSTEPSEGSAPGSEPATSGSETPGSPAGSPTSTEEGSPAGSPTSTEEGTSTEPSEGSAPGASASGAPSTGGTSESATPESGPGSPAGSPTSTEEGSPAGSPTSTEEGSTSSTAESPGPGSTSESPSGTAPGTSPSGESSTAPGTPGSGTASSSPGSSTPSGATGSPGSSPSASTGTGPGSEPATSGSETPGTSESATPESGPGSEPATSGSETPGSTSSTAESPGPGSTSSTAESPGPGTSPSGESSTAPGSEPATSGSETPGSEPATSGSETPGTSTEPSEGSAPGSTSSTAESPGPGTSTPESGSASPGSTSESPSGTAPGTSTEPSEGSAPGTSTEPSEGSAPGTSTEPSEGSAPGSSTPSGATGSPGSSPSASTGTGPGASPGTSSTGSPGSEPATSGSETPGTSESATPESGPGSPAGSPTSTEEGSSTPSGATGSPGSSPSASTGTGPGASPGTSSTGSPGTSESATPESGPGTSTEPSEGSAPGTSTEPSEGSAPGMDSDETGFEHSGLWVSVLAGLLLGACQAHPIPDSSPLLQFGGQVRQRYLYTDDAQQTEAHLEIREDGTVGGAADQSPESLLQLKALKPGVIQILGVKTSRFLCQRPDGALYGSLHFDPEACSFRELLLEDGYNVYQSEAHGLPLHLPGNKSPHRDPAPRGPARFLPLPGLPPALPEPPGILAPQPPDVGSSDPLSMVGPSQGRSPSYAS

SEQ ID NO: 901 - protein, 1528 aa, Artificial Sequence
  Description of Artificial Sequence: Synthetic polypeptide
GTSTEPSEGSAPGSEPATSGSETPGSPAGSPTSTEEGSTSSTAESPGPGTSTPESGSASPGSTSESPSGTAPGSTSESPSGTAPGTSTPESGSASPGTSTPESGSASPGSEPATSGSETPGTSESATPESGPGSPAGSPTSTEEGTSTEPSEGSAPGTSESATPESGPGTSTEPSEGSAPGTSTEPSEGSAPGSPAGSPTSTEEGTSTEPSEGSAPGTSTEPSEGSAPGTSESATPESGPGTSESATPESGPGTSTEPSEGSAPGTSTEPSEGSAPGTSESATPESGPGTSTEPSEGSAPGSEPATSGSETPGSPAGSPTSTEEGSSTPSGATGSPGTPGSGTASSSPGSSTPSGATGSPGTSTEPSEGSAPGTSTEPSEGSAPGSEPATSGSETPGSPAGSPTSTEEGSPAGSPTSTEEGTSTEPSEGSAPGPEPTGPAPSGGSEPATSGSETPGTSESATPESGPGSPAGSPTSTEEGTSESATPESGPGSPAGSPTSTEEGSPAGSPTSTEEGTSESATPESGPGSPAGSPTSTEEGSPAGSPTSTEEGSTSSTAESPGPGSTSESPSGTAPGTSPSGESSTAPGSTSESPSGTAPGSTSESPSGTAPGTSPSGESSTAPGTSTEPSEGSAPGTSESATPESGPGTSESATPESGPGSEPATSGSETPGTSESATPESGPGTSESATPESGPGTSTEPSEGSAPGTSESATPESGPGTSTEPSEGSAPGTSPSGESSTAPGTSPSGESSTAPGTSPSGESSTAPGTSTEPSEGSAPGSPAGSPTSTEEGTSTEPSEGSAPGSSPSASTGTGPGSSTPSGATGSPGSSTPSGATGSPGSSTPSGATGSPGSSTPSGATGSPGASPGTSSTGSPGASASGAPSTGGTSPSGESSTAPGSTSSTAESPGPGTSPSGESSTAPGTSESATPESGPGTSTEPSEGSAPGTSTEPSEGSAPGSSPSASTGTGPGSSTPSGATGSPGASPGTSSTGSPGTSTPESGSASPGTSPSGESSTAPGTSPSGESSTAPGTSESATPESGPGSEPATSGSETPGTSTEPSEGSAPGSTSESPSGTAPGSTSESPSGTAPGTSTPESGSASPGSPAGSPTSTEEGTSESATPESGPGTSTEPSEGSAPGSPAGSPTSTEEGTSESATPESGPGSEPATSGSETPGSSTPSGATGSPGASPGTSSTGSPGSSTPSGATGSPGSTSESPSGTAPGTSPSGESSTAPGSTSSTAESPGPGSSTPSGATGSPGASPGTSSTGSPGTPGSGTASSSPGSPAGSPTSTEEGSPAGSPTSTEEGTSTEPSEGSAPGMDSDETGFEHSGLWVSVLAGLLLGACQAHPIPDSSPLLQFGGQVRQRYLYTDDAQQTEAHLEIREDGTVGGAADQSPESLLQLKALKPGVIQILGVKTSRFLCQRPDGALYGSLHFDPEACSFRELLLEDGYNVYQSEAHGLPLHLPGNKSPHRDPAPRGPARFLPLPGLPPALPEPPGILAPQPPDVGSSDPLSMVGPSQGRSPSYAS

SEQ ID NO: 902 - protein, 179 aa, Artificial Sequence
  Description of Artificial Sequence: Synthetic polypeptide
QLGPQGPPHLVADPSKKQGPWLEEEEEAYGWMDFGGSEPATSGSETPGTSESATPESGPGSEPATSGSETPGSPAGSPTSTEEGTSTEPSEGSAPGSEPATSGSETPGSEPATSGSETPGSEPATSGSETPGTSTEPSEGSAPGTSESATPESGPGSEPATSGSETPGTSTEPSEGSAP

SEQ ID NO: 903 - protein, 179 aa, Artificial Sequence
  Description of Artificial Sequence: Synthetic polypeptide
QLGPQGPPHLVADPSKKQGPWLEEEEEAYGWMDFGGTSTPESGSASPGTSPSGESSTAPGTSPSGESSTAPGSTSSTAESPGPGSTSESPSGTAPGSTSSTAESPGPGTSPSGESSTAPGTSTPESGSASPGSTSSTAESPGPGTSPSGESSTAPGTSPSGESSTAPGTSPSGESSTAP

SEQ ID NO: 904 - protein, 323 aa, Artificial Sequence
  Description of Artificial Sequence: Synthetic polypeptide
QLGPQGPPHLVADPSKKQGPWLEEEEEAYGWMDFGGTSESATPESGPGSEPATSGSETPGTSESATPESGPGSEPATSGSETPGTSESATPESGPGTSTEPSEGSAPGSPAGSPTSTEEGTSESATPESGPGSEPATSGSETPGTSESATPESGPGSPAGSPTSTEEGSPAGSPTSTEEGTSTEPSEGSAPGTSESATPESGPGTSESATPESGPGTSESATPESGPGSEPATSGSETPGSEPATSGSETPGSPAGSPTSTEEGTSTEPSEGSAPGTSTEPSEGSAPGSEPATSGSETPGTSESATPESGPGTSTEPSEGSAP

SEQ ID NO: 905 - protein, 611 aa, Artificial Sequence
  Description of Artificial Sequence: Synthetic polypeptide
QLGPQGPPHLVADPSKKQGPWLEEEEEAYGWMDFGGSPAGSPTSTEEGTSESATPESGPGTSTEPSEGSAPGSPAGSPTSTEEGTSTEPSEGSAPGTSTEPSEGSAPGTSESATPESGPGSEPATSGSETPGSEPATSGSETPGSPAGSPTSTEEGTSESATPESGPGTSTEPSEGSAPGTSTEPSEGSAPGSPAGSPTSTEEGTSTEPSEGSAPGTSTEPSEGSAPGTSESATPESGPGTSTEPSEGSAPGTSESATPESGPGSEPATSGSETPGTSTEPSEGSAPGTSTEPSEGSAPGTSESATPESGPGTSESATPESGPGSPAGSPTSTEEGTSESATPESGPGSEPATSGSETPGTSESATPESGPGTSTEPSEGSAPGTSTEPSEGSAPGTSTEPSEGSAPGTSTEPSEGSAPGTSTEPSEGSAPGTSTEPSEGSAPGSPAGSPTSTEEGTSTEPSEGSAPGTSESATPESGPGSEPATSGSETPGTSESATPESGPGSEPATSGSETPGTSESATPESGPGTSTEPSEGSAPGTSESATPESGPGSPAGSPTSTEEGSPAGSPTSTEEGSPAGSPTSTEEGTSESATPESGPGTSTEPSEGSAP

SEQ ID NO: 906 - protein, 611 aa, Artificial Sequence
  Description of Artificial Sequence: Synthetic polypeptide
QLGPQGPPHLVADPSKKQGPWLEEEEEAYGWMDFGGSTSSTAESPGPGSTSSTAESPGPGSTSESPSGTAPGSTSSTAESPGPGSTSSTAESPGPGTSTPESGSASPGSTSESPSGTAPGTSPSGESSTAPGSTSESPSGTAPGSTSESPSGTAPGTSPSGESSTAPGSTSESPSGTAPGSTSESPSGTAPGTSPSGESSTAPGSTSESPSGTAPGSTSESPSGTAPGSTSESPSGTAPGTSTPESGSASPGSTSESPSGTAPGTSTPESGSASPGSTSSTAESPGPGSTSSTAESPGPGTSTPESGSASPGTSTPESGSASPGSTSESPSGTAPGTSTPESGSASPGTSTPESGSASPGSTSESPSGTAPGSTSESPSGTAPGSTSESPSGTAPGSTSSTAESPGPGTSTPESGSASPGTSTPESGSASPGSTSESPSGTAPGSTSESPSGTAPGTSTPESGSASPGSTSESPSGTAPGSTSESPSGTAPGTSTPESGSASPGTSPSGESSTAPGSTSSTAESPGPGTSPSGESSTAPGSTSSTAESPGPGTSTPESGSASPGSTSESPSGTAPGSTSSTAESPGPGTSTPESGSASPGTSTPESGSASP

SEQ ID NO: 907 - protein, 871 aa, Artificial Sequence
  Description of Artificial Sequence: Synthetic polypeptide
QLGPQGPPHLVADPSKKQGPWLEEEEEAYGWMDFGGSSESGSSEGGPGSSESGSSEGGPGESPGGSSGSESGSGGEPSESGSSGESPGGSSGSESGESPGGSSGSESGSSESGSSEGGPGSSESGSSEGGPGSSESGSSEGGPGESPGGSSGSESGESPGGSSGSESGESPGGSSGSESGSSESGSSEGGPGSSESGSSEGGPGSSESGSSEGGPGSSESGSSEGGPGSSESGSSEGGPGSSESGSSEGGPGSGGEPSESGSSGESPGGSSGSESGESPGGSSGSESGSGGEPSESGSSGSEGSSGPGESSGSSESGSSEGGPGSGGEPSESGSSGSEGSSGPGESSGSSESGSSEGGPGSGGEPSESGSSGESPGGSSGSESGSGGEPSESGSSGSGGEPSESGSSGSSESGSSEGGPGSGGEPSESGSSGSGGEPSESGSSGSEGSSGPGESSGESPGGSSGSESGSEGSSGPGESSGSEGSSGPGESSGSGGEPSESGSSGSSESGSSEGGPGSSESGSSEGGPGESPGGSSGSESGSGGEPSESGSSGSEGSSGPGESSGESPGGSSGSESGSEGSSGPGSSESGSSEGGPGSGGEPSESGSSGSEGSSGPGESSGSEGSSGPGESSGSEGSSGPGESSGSGGEPSESGSSGSGGEPSESGSSGESPGGSSGSESGESPGGSSGSESGSGGEPSESGSSGSEGSSGPGESSGESPGGSSGSESGSSESGSSEGGPGSSESGSSEGGPGSSESGSSEGGPGSGGEPSESGSSGSSESGSSEGGPGESPGGSSGSESGSGGEPSESGSSGSSESGSSEGGPGESPGGSSGSESGSGGEPSESGSSGESPGGSSGSESGSGGEPSESGSS

SEQ ID NO: 908 - protein, 899 aa, Artificial Sequence
  Description of Artificial Sequence: Synthetic polypeptide
QLGPQGPPHLVADPSKKQGPWLEEEEEAYGWMDFGGSPAGSPTSTEEGTSESATPESGPGTSTEPSEGSAPGSPAGSPTSTEEGTSTEPSEGSAPGTSTEPSEGSAPGTSESATPESGPGSEPATSGSETPGSEPATSGSETPGSPAGSPTSTEEGTSESATPESGPGTSTEPSEGSAPGTSTEPSEGSAPGSPAGSPTSTEEGTSTEPSEGSAPGTSTEPSEGSAPGTSESATPESGPGTSTEPSEGSAPGTSESATPESGPGSEPATSGSETPGTSTEPSEGSAPGTSTEPSEGSAPGTSESATPESGPGTSESATPESGPGSPAGSPTSTEEGTSESATPESGPGSEPATSGSETPGTSESATPESGPGTSTEPSEGSAPGTSTEPSEGSAPGTSTEPSEGSAPGTSTEPSEGSAPGTSTEPSEGSAPGTSTEPSEGSAPGSPAGSPTSTEEGTSTEPSEGSAPGTSESATPESGPGSEPATSGSETPGTSESATPESGPGSEPATSGSETPGTSESATPESGPGTSTEPSEGSAPGTSESATPESGPGSPAGSPTSTEEGSPAGSPTSTEEGSPAGSPTSTEEGTSESATPESGPGTSTEPSEGSAPGTSESATPESGPGSEPATSGSETPGTSESATPESGPGSEPATSGSETPGTSESATPESGPGTSTEPSEGSAPGSPAGSPTSTEEGTSESATPESGPGSEPATSGSETPGTSESATPESGPGSPAGSPTSTEEGSPAGSPTSTEEGTSTEPSEGSAPGTSESATPESGPGTSESATPESGPGTSESATPESGPGSEPATSGSETPGSEPATSGSETPGSPAGSPTSTEEGTSTEPSEGSAPGTSTEPSEGSAPGSEPATSGSETPGTSESATPESGPGTSTEPSEGSAP

SEQ ID NO: 909 - protein, 910 aa, Artificial Sequence
  Description of Artificial Sequence: Synthetic polypeptide
  MOD_RES (465)..(467): Any amino acid
  MOD_RES (478)..(481): Any amino acid
QLGPQGPPHLVADPSKKQGPWLEEEEEAYGWMDFGGSTSESPSGTAPGTSPSGESSTAPGSTSESPSGTAPGSTSESPSGTAPGTSTPESGSASPGTSTPESGSASPGSTSESPSGTAPGSTSESPSGTAPGTSPSGESSTAPGSTSESPSGTAPGTSPSGESSTAPGTSPSGESSTAPGSTSSTAESPGPGTSPSGESSTAPGTSPSGESSTAPGSTSSTAESPGPGTSTPESGSASPGTSTPESGSASPGSTSESPSGTAPGSTSESPSGTAPGTSTPESGSASPGSTSSTAESPGPGTSTPESGSASPGSTSESPSGTAPGTSPSGESSTAPGSTSSTAESPGPGTSPSGESSTAPGTSTPESGSASPGSTSSTAESPGPGSTSSTAESPGPGSTSSTAESPGPGSTSSTAESPGPGTSPSGESSTAPGSTSESPSGTAPGSTSESPSGTAPGTSTPESGPXXXGASASGAPSTXXXXSESPSGTAPGSTSESPSGTAPGSTSESPSGTAPGSTSESPSGTAPGSTSESPSGTAPGSTSESPSGTAPGTSTPESGSASPGTSPSGESSTAPGTSPSGESSTAPGSTSSTAESPGPGTSPSGESSTAPGTSTPESGSASPGSTSESPSGTAPGSTSESPSGTAPGTSPSGESSTAPGSTSESPSGTAPGTSTPESGSASPGTSTPESGSASPGSTSESPSGTAPGTSTPESGSASPGSTSSTAESPGPGSTSESPSGTAPGSTSESPSGTAPGTSPSGESSTAPGSTSSTAESPGPGTSPSGESSTAPGTSTPESGSASPGTSPSGESSTAPGTSPSGESSTAPGTSPSGESSTAPGSTSSTAESPGPGSTSSTAESPGPGTSPSGESSTAPGSSPSASTGTGPGSSTPSGATGSPGSSTPSGATGSP

SEQ ID NO: 910 - protein, 899 aa, Artificial Sequence
  Description of Artificial Sequence: Synthetic polypeptide
QLGPQGPPHLVADPSKKQGPWLEEEEEAYGWMDFGGASPGTSSTGSPGSSPSASTGTGPGSSPSASTGTGPGTPGSGTASSSPGSSTPSGATGSPGSNPSASTGTGPGASPGTSSTGSPGTPGSGTASSSPGSSTPSGATGSPGTPGSGTASSSPGASPGTSSTGSPGASPGTSSTGSPGTPGSGTASSSPGSSTPSGATGSPGASPGTSSTGSPGTPGSGTASSSPGSSTPSGATGSPGSNPSASTGTGPGSSPSASTGTGPGSSTPSGATGSPGSSTPSGATGSPGASPGTSSTGSPGASPGTSSTGSPGASPGTSSTGSPGTPGSGTASSSPGASPGTSSTGSPGASPGTSSTGSPGASPGTSSTGSPGSSPSASTGTGPGTPGSGTASSSPGASPGTSSTGSPGASPGTSSTGSPGASPGTSSTGSPGSSTPSGATGSPGSSTPSGATGSPGASPGTSSTGSPGTPGSGTASSSPGSSTPSGATGSPGSSTPSGATGSPGSSTPSGATGSPGSSPSASTGTGPGASPGTSSTGSPGASPGTSSTGSPGTPGSGTASSSPGASPGTSSTGSPGASPGTSSTGSPGASPGTSSTGSPGASPGTSSTGSPGTPGSGTASSSPGSSTPSGATGSPGTPGSGTASSSPGSSTPSGATGSPGTPGSGTASSSPGSSTPSGATGSPGSSTPSGATGSPGSSPSASTGTGPGSSPSASTGTGPGASPGTSSTGSPGTPGSGTASSSPGSSTPSGATGSPGSSPSASTGTGPGSSPSASTGTGPGASPGTSSTGSPGASPGTSSTGSPGSSTPSGATGSPGSSPSASTGTGPGASPGTSSTGSPGSSPSASTGTGPGTPGSGTASSSPGSSTPSGATGSPGSSTPSGATGSPGASPGTSSTGSP

SEQ ID NO: 911 - protein, 910 aa, Artificial Sequence
  Description of Artificial Sequence: Synthetic polypeptide
QLGPQGPPHLVADPSKKQGPWLEEEEEAYGWMDFGGTSTEPSEGSAPGSEPATSGSETPGSPAGSPTSTEEGSTSSTAESPGPGTSTPESGSASPGSTSESPSGTAPGSTSESPSGTAPGTSTPESGSASPGTSTPESGSASPGSEPATSGSETPGTSESATPESGPGSPAGSPTSTEEGTSTEPSEGSAPGTSESATPESGPGTSTEPSEGSAPGTSTEPSEGSAPGSPAGSPTSTEEGTSTEPSEGSAPGTSTEPSEGSAPGTSESATPESGPGTSESATPESGPGTSTEPSEGSAPGTSTEPSEGSAPGTSESATPESGPGTSTEPSEGSAPGSEPATSGSETPGSPAGSPTSTEEGSSTPSGATGSPGTPGSGTASSSPGSSTPSGATGSPGTSTEPSEGSAPGTSTEPSEGSAPGSEPATSGSETPGSPAGSPTSTEEGSPAGSPTSTEEGTSTEPSEGSAPGASASGAPSTGGTSESATPESGPGSPAGSPTSTEEGSPAGSPTSTEEGSTSSTAESPGPGSTSESPSGTAPGTSPSGESSTAPGTPGSGTASSSPGSSTPSGATGSPGSSPSASTGTGPGSEPATSGSETPGTSESATPESGPGSEPATSGSETPGSTSSTAESPGPGSTSSTAESPGPGTSPSGESSTAPGSEPATSGSETPGSEPATSGSETPGTSTEPSEGSAPGSTSSTAESPGPGTSTPESGSASPGSTSESPSGTAPGTSTEPSEGSAPGTSTEPSEGSAPGTSTEPSEGSAPGSSTPSGATGSPGSSPSASTGTGPGASPGTSSTGSPGSEPATSGSETPGTSESATPESGPGSPAGSPTSTEEGSSTPSGATGSPGSSPSASTGTGPGASPGTSSTGSPGTSESATPESGPGTSTEPSEGSAPGTSTEPSEGSAP

SEQ ID NO: 912 - protein, 1353 aa, Artificial Sequence
  Description of Artificial Sequence: Synthetic polypeptide
QLGPQGPPHLVADPSKKQGPWLEEEEEAYGWMDFGGTSTEPSEGSAPGSEPATSGSETPGSPAGSPTSTEEGSTSSTAESPGPGTSTPESGSASPGSTSESPSGTAPGSTSESPSGTAPGTSTPESGSASPGTSTPESGSASPGSEPATSGSETPGTSESATPESGPGSPAGSPTSTEEGTSTEPSEGSAPGTSESATPESGPGTSTEPSEGSAPGTSTEPSEGSAPGSPAGSPTSTEEGTSTEPSEGSAPGTSTEPSEGSAPGTSESATPESGPGTSESATPESGPGTSTEPSEGSAPGTSTEPSEGSAPGTSESATPESGPGTSTEPSEGSAPGSEPATSGSETPGSPAGSPTSTEEGSSTPSGATGSPGTPGSGTASSSPGSSTPSGATGSPGTSTEPSEGSAPGTSTEPSEGSAPGSEPATSGSETPGSPAGSPTSTEEGSPAGSPTSTEEGTSTEPSEGSAPGPEPTGPAPSGGSEPATSGSETPGTSESATPESGPGSPAGSPTSTEEGTSESATPESGPGSPAGSPTSTEEGSPAGSPTSTEEGTSESATPESGPGSPAGSPTSTEEGSPAGSPTSTEEGSTSSTAESPGPGSTSESPSGTAPGTSPSGESSTAPGSTSESPSGTAPGSTSESPSGTAPGTSPSGESSTAPGTSTEPSEGSAPGTSESATPESGPGTSESATPESGPGSEPATSGSETPGTSESATPESGPGTSESATPESGPGTSTEPSEGSAPGTSESATPESGPGTSTEPSEGSAPGTSPSGESSTAPGTSPSGESSTAPGTSPSGESSTAPGTSTEPSEGSAPGSPAGSPTSTEEGTSTEPSEGSAPGSSPSASTGTGPGSSTPSGATGSPGSSTPSGATGSPGSSTPSGATGSPGSSTPSGATGSPGASPGTSSTGSPGASASGAPSTGGTSPSGESSTAPGSTSSTAESPGPGTSPSGESSTAPGTSESATPESGPGTSTEPSEGSAPGTSTEPSEGSAPGSSPSASTGTGPGSSTPSGATGSPGASPGTSSTGSPGTSTPESGSASPGTSPSGESSTAPGTSPSGESSTAPGTSESATPESGPGSEPATSGSETPGTSTEPSEGSAPGSTSESPSGTAPGSTSESPSGTAPGTSTPESGSASPGSPAGSPTSTEEGTSESATPESGPGTSTEPSEGSAPGSPAGSPTSTEEGTSESATPESGPGSEPATSGSETPGSSTPSGATGSPGASPGTSSTGSPGSSTPSGATGSPGSTSESPSGTAPGTSPSGESSTAPGSTSSTAESPGPGSSTPSGATGSPGASPGTSSTGSPGTPGSGTASSSPGSPAGSPTSTEEGSPAGSPTSTEEGTSTEPSEGSAP

SEQ ID NO: 913 - protein, 948 aa, Artificial Sequence
  Description of Artificial Sequence: Synthetic polypeptide
MAEPAGSPTSTEEGTPGSGTASSSPGSSTPSGATGSPGASPGTSSTGSPGSPAGSPTSTEEGTSESATPESGPGTSTEPSEGSAPGSPAGSPTSTEEGTSTEPSEGSAPGTSTEPSEGSAPGTSESATPESGPGSEPATSGSETPGSEPATSGSETPGSPAGSPTSTEEGTSESATPESGPGTSTEPSEGSAPGTSTEPSEGSAPGSPAGSPTSTEEGTSTEPSEGSAPGTSTEPSEGSAPGTSESATPESGPGTSTEPSEGSAPGTSESATPESGPGSEPATSGSETPGTSTEPSEGSAPGTSTEPSEGSAPGTSESATPESGPGTSESATPESGPGSPAGSPTSTEEGTSESATPESGPGSEPATSGSETPGTSESATPESGPGTSTEPSEGSAPGTSTEPSEGSAPGTSTEPSEGSAPGTSTEPSEGSAPGTSTEPSEGSAPGTSTEPSEGSAPGSPAGSPTSTEEGTSTEPSEGSAPGTSESATPESGPGSEPATSGSETPGTSESATPESGPGSEPATSGSETPGTSESATPESGPGTSTEPSEGSAPGTSESATPESGPGSPAGSPTSTEEGSPAGSPTSTEEGSPAGSPTSTEEGTSESATPESGPGTSTEPSEGSAPGTSESATPESGPGSEPATSGSETPGTSESATPESGPGSEPATSGSETPGTSESATPESGPGTSTEPSEGSAPGSPAGSPTSTEEGTSESATPESGPGSEPATSGSETPGTSESATPESGPGSPAGSPTSTEEGSPAGSPTSTEEGTSTEPSEGSAPGTSESATPESGPGTSESATPESGPGTSESATPESGPGSEPATSGSETPGSEPATSGSETPGSPAGSPTSTEEGTSTEPSEGSAPGTSTEPSEGSAPGSEPATSGSETPGTSESATPESGPGTSTEPSEGSAPGQLGPQGPPHLVADPSKKQGPWLEEEEEAYGWMDF

SEQ ID NO: 914 - protein, 959 aa, Artificial Sequence
  Description of Artificial Sequence: Synthetic polypeptide
MAEPAGSPTSTEEGASPGTSSTGSPGSSTPSGATGSPGSSTPSGATGSPGTSTEPSEGSAPGSEPATSGSETPGSPAGSPTSTEEGSTSSTAESPGPGTSTPESGSASPGSTSESPSGTAPGSTSESPSGTAPGTSTPESGSASPGTSTPESGSASPGSEPATSGSETPGTSESATPESGPGSPAGSPTSTEEGTSTEPSEGSAPGTSESATPESGPGTSTEPSEGSAPGTSTEPSEGSAPGSPAGSPTSTEEGTSTEPSEGSAPGTSTEPSEGSAPGTSESATPESGPGTSESATPESGPGTSTEPSEGSAPGTSTEPSEGSAPGTSESATPESGPGTSTEPSEGSAPGSEPATSGSETPGSPAGSPTSTEEGSSTPSGATGSPGTPGSGTASSSPGSSTPSGATGSPGTSTEPSEGSAPGTSTEPSEGSAPGSEPATSGSETPGSPAGSPTSTEEGSPAGSPTSTEEGTSTEPSEGSAPGASASGAPSTGGTSESATPESGPGSPAGSPTSTEEGSPAGSPTSTEEGSTSSTAESPGPGSTSESPSGTAPGTSPSGESSTAPGTPGSGTASSSPGSSTPSGATGSPGSSPSASTGTGPGSEPATSGSETPGTSESATPESGPGSEPATSGSETPGSTSSTAESPGPGSTSSTAESPGPGTSPSGESSTAPGSEPATSGSETPGSEPATSGSETPGTSTEPSEGSAPGSTSSTAESPGPGTSTPESGSASPGSTSESPSGTAPGTSTEPSEGSAPGTSTEPSEGSAPGTSTEPSEGSAPGSSTPSGATGSPGSSPSASTGTGPGASPGTSSTGSPGSEPATSGSETPGTSESATPESGPGSPAGSPTSTEEGSSTPSGATGSPGSSPSASTGTGPGASPGTSSTGSPGTSESATPESGPGTSTEPSEGSAPGTSTEPSEGSAPGQLGPQGPPHLVADPSKKQGPWLEEEEEAYGWMDF

SEQ ID NO: 915 - protein, 179 aa, Artificial Sequence
  Description of Artificial Sequence: Synthetic polypeptide
GSEPATSGSETPGTSESATPESGPGSEPATSGSETPGSPAGSPTSTEEGTSTEPSEGSAPGSEPATSGSETPGSEPATSGSETPGSEPATSGSETPGTSTEPSEGSAPGTSESATPESGPGSEPATSGSETPGTSTEPSEGSAPGQLGPQGPPHLVADPSKKQGPWLEEEEEAYGWMDF

SEQ ID NO: 916 - protein, 179 aa, Artificial Sequence
  Description of Artificial Sequence: Synthetic polypeptide
GTSTPESGSASPGTSPSGESSTAPGTSPSGESSTAPGSTSSTAESPGPGSTSESPSGTAPGSTSSTAESPGPGTSPSGESSTAPGTSTPESGSASPGSTSSTAESPGPGTSPSGESSTAPGTSPSGESSTAPGTSPSGESSTAPGQLGPQGPPHLVADPSKKQGPWLEEEEEAYGWMDF

SEQ ID NO: 917 - protein, 323 aa, Artificial Sequence
  Description of Artificial Sequence: Synthetic polypeptide
GTSESATPESGPGSEPATSGSETPGTSESATPESGPGSEPATSGSETPGTSESATPESGPGTSTEPSEGSAPGSPAGSPTSTEEGTSESATPESGPGSEPATSGSETPGTSESATPESGPGSPAGSPTSTEEGSPAGSPTSTEEGTSTEPSEGSAPGTSESATPESGPGTSESATPESGPGTSESATPESGPGSEPATSGSETPGSEPATSGSETPGSPAGSPTSTEEGTSTEPSEGSAPGTSTEPSEGSAPGSEPATSGSETPGTSESATPESGPGTSTEPSEGSAPGQLGPQGPPHLVADPSKKQGPWLEEEEEAYGWMDF

SEQ ID NO: 918 - protein, 611 aa, Artificial Sequence
  Description of Artificial Sequence: Synthetic polypeptide
GSPAGSPTSTEEGTSESATPESGPGTSTEPSEGSAPGSPAGSPTSTEEGTSTEPSEGSAPGTSTEPSEGSAPGTSESATPESGPGSEPATSGSETPGSEPATSGSETPGSPAGSPTSTEEGTSESATPESGPGTSTEPSEGSAPGTSTEPSEGSAPGSPAGSPTSTEEGTSTEPSEGSAPGTSTEPSEGSAPGTSESATPESGPGTSTEPSEGSAPGTSESATPESGPGSEPATSGSETPGTSTEPSEGSAPGTSTEPSEGSAPGTSESATPESGPGTSESATPESGPGSPAGSPTSTEEGTSESATPESGPGSEPATSGSETPGTSESATPESGPGTSTEPSEGSAPGTSTEPSEGSAPGTSTEPSEGSAPGTSTEPSEGSAPGTSTEPSEGSAPGTSTEPSEGSAPGSPAGSPTSTEEGTSTEPSEGSAPGTSESATPESGPGSEPATSGSETPGTSESATPESGPGSEPATSGSETPGTSESATPESGPGTSTEPSEGSAPGTSESATPESGPGSPAGSPTSTEEGSPAGSPTSTEEGSPAGSPTSTEEGTSESATPESGPGTSTEPSEGSAPGQLGPQGPPHLVADPSKKQGPWLEEEEEAYGWMDF

SEQ ID NO: 919 - protein, 611 aa, Artificial Sequence
  Description of Artificial Sequence: Synthetic polypeptide
GSTSSTAESPGPGSTSSTAESPGPGSTSESPSGTAPGSTSSTAESPGPGSTSSTAESPGPGTSTPESGSASPGSTSESPSGTAPGTSPSGESSTAPGSTSESPSGTAPGSTSESPSGTAPGTSPSGESSTAPGSTSESPSGTAPGSTSESPSGTAPGTSPSGESSTAPGSTSESPSGTAPGSTSESPSGTAPGSTSESPSGTAPGTSTPESGSASPGSTSESPSGTAPGTSTPESGSASPGSTSSTAESPGPGSTSSTAESPGPGTSTPESGSASPGTSTPESGSASPGSTSESPSGTAPGTSTPESGSASPGTSTPESGSASPGSTSESPSGTAPGSTSESPSGTAPGSTSESPSGTAPGSTSSTAESPGPGTSTPESGSASPGTSTPESGSASPGSTSESPSGTAPGSTSESPSGTAPGTSTPESGSASPGSTSESPSGTAPGSTSESPSGTAPGTSTPESGSASPGTSPSGESSTAPGSTSSTAESPGPGTSPSGESSTAPGSTSSTAESPGPGTSTPESGSASPGSTSESPSGTAPGSTSSTAESPGPGTSTPESGSASPGTSTPESGSASPGQLGPQGPPHLVADPSKKQGPWLEEEEEAYGWMDF

SEQ ID NO: 920 - protein, 871 aa, Artificial Sequence
  Description of Artificial Sequence: Synthetic polypeptide
GSSESGSSEGGPGSSESGSSEGGPGESPGGSSGSESGSGGEPSESGSSGESPGGSSGSESGESPGGSSGSESGSSESGSSEGGPGSSESGSSEGGPGSSESGSSEGGPGESPGGSSGSESGESPGGSSGSESGESPGGSSGSESGSSESGSSEGGPGSSESGSSEGGPGSSESGSSEGGPGSSESGSSEGGPGSSESGSSEGGPGSSESGSSEGGPGSGGEPSESGSSGESPGGSSGSESGESPGGSSGSESGSGGEPSESGSSGSEGSSGPGESSGSSESGSSEGGPGSGGEPSESGSSGSEGSSGPGESSGSSESGSSEGGPGSGGEPSESGSSGESPGGSSGSESGSGGEPSESGSSGSGGEPSESGSSGSSESGSSEGGPGSGGEPSESGSSGSGGEPSESGSSGSEGSSGPGESSGESPGGSSGSESGSEGSSGPGESSGSEGSSGPGESSGSGGEPSESGSSGSSESGSSEGGPGSSESGSSEGGPGESPGGSSGSESGSGGEPSESGSSGSEGSSGPGESSGESPGGSSGSESGSEGSSGPGSSESGSSEGGPGSGGEPSESGSSGSEGSSGPGESSGSEGSSGPGESSGSEGSSGPGESSGSGGEPSESGSSGSGGEPSESGSSGESPGGSSGSESGESPGGSSGSESGSGGEPSESGSSGSEGSSGPGESSGESPGGSSGSESGSSESGSSEGGPGSSESGSSEGGPGSSESGSSEGGPGSGGEPSESGSSGSSESGSSEGGPGESPGGSSGSESGSGGEPSESGSSGSSESGSSEGGPGESPGGSSGSESGSGGEPSESGSSGESPGGSSGSESGSGGEPSESGSSGQLGPQGPPHLVADPSKKQGPWLEEEEEAYGWMDF

SEQ ID NO: 921 - protein, 899 aa, Artificial Sequence
  Description of Artificial Sequence: Synthetic polypeptide
GSPAGSPTSTEEGTSESATPESGPGTSTEPSEGSAPGSPAGSPTSTEEGTSTEPSEGSAPGTSTEPSEGSAPGTSESATPESGPGSEPATSGSETPGSEPATSGSETPGSPAGSPTSTEEGTSESATPESGPGTSTEPSEGSAPGTSTEPSEGSAPGSPAGSPTSTEEGTSTEPSEGSAPGTSTEPSEGSAPGTSESATPESGPGTSTEPSEGSAPGTSESATPESGPGSEPATSGSETPGTSTEPSEGSAPGTSTEPSEGSAPGTSESATPESGPGTSESATPESGPGSPAGSPTSTEEGTSESATPESGPGSEPATSGSETPGTSESATPESGPGTSTEPSEGSAPGTSTEPSEGSAPGTSTEPSEGSAPGTSTEPSEGSAPGTSTEPSEGSAPGTSTEPSEGSAPGSPAGSPTSTEEGTSTEPSEGSAPGTSESATPESGPGSEPATSGSETPGTSESATPESGPGSEPATSGSETPGTSESATPESGPGTSTEPSEGSAPGTSESATPESGPGSPAGSPTSTEEGSPAGSPTSTEEGSPAGSPTSTEEGTSESATPESGPGTSTEPSEGSAPGTSESATPESGPGSEPATSGSETPGTSESATPESGPGSEPATSGSETPGTSESATPESGPGTSTEPSEGSAPGSPAGSPTSTEEGTSESATPESGPGSEPATSGSETPGTSESATPESGPGSPAGSPTSTEEGSPAGSPTSTEEGTSTEPSEGSAPGTSESATPESGPGTSESATPESGPGTSESATPESGPGSEPATSGSETPGSEPATSGSETPGSPAGSPTSTEEGTSTEPSEGSAPGTSTEPSEGSAPGSEPATSGSETPGTSESATPESGPGTSTEPSEGSAPGQLGPQGPPHLVADPSKKQGPWLEEEEEAYGWMDF

SEQ ID NO: 922 - protein, 910 aa, Artificial Sequence
  Description of Artificial Sequence: Synthetic polypeptide
  MOD_RES (430)..(432): Any amino acid
  MOD_RES (443)..(446): Any amino acid
GSTSESPSGTAPGTSPSGESSTAPGSTSESPSGTAPGSTSESPSGTAPGTSTPESGSASPGTSTPESGSASPGSTSESPSGTAPGSTSESPSGTAPGTSPSGESSTAPGSTSESPSGTAPGTSPSGESSTAPGTSPSGESSTAPGSTSSTAESPGPGTSPSGESSTAPGTSPSGESSTAPGSTSSTAESPGPGTSTPESGSASPGTSTPESGSASPGSTSESPSGTAPGSTSESPSGTAPGTSTPESGSASPGSTSSTAESPGPGTSTPESGSASPGSTSESPSGTAPGTSPSGESSTAPGSTSSTAESPGPGTSPSGESSTAPGTSTPESGSASPGSTSSTAESPGPGSTSSTAESPGPGSTSSTAESPGPGSTSSTAESPGPGTSPSGESSTAPGSTSESPSGTAPGSTSESPSGTAPGTSTPESGPXXXGASASGAPSTXXXXSESPSGTAPGSTSESPSGTAPGSTSESPSGTAPGSTSESPSGTAPGSTSESPSGTAPGSTSESPSGTAPGTSTPESGSASPGTSPSGESSTAPGTSPSGESSTAPGSTSSTAESPGPGTSPSGESSTAPGTSTPESGSASPGSTSESPSGTAPGSTSESPSGTAPGTSPSGESSTAPGSTSESPSGTAPGTSTPESGSASPGTSTPESGSASPGSTSESPSGTAPGTSTPESGSASPGSTSSTAESPGPGSTSESPSGTAPGSTSESPSGTAPGTSPSGESSTAPGSTSSTAESPGPGTSPSGESSTAPGTSTPESGSASPGTSPSGESSTAPGTSPSGESSTAPGTSPSGESSTAPGSTSSTAESPGPGSTSSTAESPGPGTSPSGESSTAPGSSPSASTGTGPGSSTPSGATGSPGSSTPSGATGSPGQLGPQGPPHLVADPSKKQGPWLEEEEEAYGWMDF

SEQ ID NO: 923 - protein, 899 aa, Artificial Sequence
  Description of Artificial Sequence: Synthetic polypeptide
GASPGTSSTGSPGSSPSASTGTGPGSSPSASTGTGPGTPGSGTASSSPGSSTPSGATGSPGSNPSASTGTGPGASPGTSSTGSPGTPGSGTASSSPGSSTPSGATGSPGTPGSGTASSSPGASPGTSSTGSPGASPGTSSTGSPGTPGSGTASSSPGSSTPSGATGSPGASPGTSSTGSPGTPGSGTASSSPGSSTPSGATGSPGSNPSASTGTGPGSSPSASTGTGPGSSTPSGATGSPGSSTPSGATGSPGASPGTSSTGSPGASPGTSSTGSPGASPGTSSTGSPGTPGSGTASSSPGASPGTSSTGSPGASPGTSSTGSPGASPGTSSTGSPGSSPSASTGTGPGTPGSGTASSSPGASPGTSSTGSPGASPGTSSTGSPGASPGTSSTGSPGSSTPSGATGSPGSSTPSGATGSPGASPGTSSTGSPGTPGSGTASSSPGSSTPSGATGSPGSSTPSGATGSPGSSTPSGATGSPGSSPSASTGTGPGASPGTSSTGSPGASPGTSSTGSPGTPGSGTASSSPGASPGTSSTGSPGASPGTSSTGSPGASPGTSSTGSPGASPGTSSTGSPGTPGSGTASSSPGSSTPSGATGSPGTPGSGTASSSPGSSTPSGATGSPGTPGSGTASSSPGSSTPSGATGSPGSSTPSGATGSPGSSPSASTGTGPGSSPSASTGTGPGASPGTSSTGSPGTPGSGTASSSPGSSTPSGATGSPGSSPSASTGTGPGSSPSASTGTGPGASPGTSSTGSPGASPGTSSTGSPGSSTPSGATGSPGSSPSASTGTGPGASPGTSSTGSPGSSPSASTGTGPGTPGSGTASSSPGSSTPSGATGSPGSSTPSGATGSPGASPGTSSTGSPGQLGPQGPPHLVADPSKKQGPWLEEEEEAYGWMDF

SEQ ID NO: 924 - protein, 910 aa, Artificial Sequence
  Description of Artificial Sequence: Synthetic polypeptide
GTSTEPSEGSAPGSEPATSGSETPGSPAGSPTSTEEGSTSSTAESPGPGTSTPESGSASPGSTSESPSGTAPGSTSESPSGTAPGTSTPESGSASPGTSTPESGSASPGSEPATSGSETPGTSESATPESGPGSPAGSPTSTEEGTSTEPSEGSAPGTSESATPESGPGTSTEPSEGSAPGTSTEPSEGSAPGSPAGSPTSTEEGTSTEPSEGSAPGTSTEPSEGSAPGTSESATPESGPGTSESATPESGPGTSTEPSEGSAPGTSTEPSEGSAPGTSESATPESGPGTSTEPSEGSAPGSEPATSGSETPGSPAGSPTSTEEGSSTPSGATGSPGTPGSGTASSSPGSSTPSGATGSPGTSTEPSEGSAPGTSTEPSEGSAPGSEPATSGSETPGSPAGSPTSTEEGSPAGSPTSTEEGTSTEPSEGSAPGASASGAPSTGGTSESATPESGPGSPAGSPTSTEEGSPAGSPTSTEEGSTSSTAESPGPGSTSESPSGTAPGTSPSGESSTAPGTPGSGTASSSPGSSTPSGATGSPGSSPSASTGTGPGSEPATSGSETPGTSESATPESGPGSEPATSGSETPGSTSSTAESPGPGSTSSTAESPGPGTSPSGESSTAPGSEPATSGSETPGSEPATSGSETPGTSTEPSEGSAPGSTSSTAESPGPGTSTPESGSASPGSTSESPSGTAPGTSTEPSEGSAPGTSTEPSEGSAPGTSTEPSEGSAPGSSTPSGATGSPGSSPSASTGTGPGASPGTSSTGSPGSEPATSGSETPGTSESATPESGPGSPAGSPTSTEEGSSTPSGATGSPGSSPSASTGTGPGASPGTSSTGSPGTSESATPESGPGTSTEPSEGSAPGTSTEPSEGSAPGQLGPQGPPHLVADPSKKQGPWLEEEEEAYGWMDF

SEQ ID NO: 925 - protein, 1353 aa, Artificial Sequence
  Description of Artificial Sequence: Synthetic polypeptide
GTSTEPSEGSAPGSEPATSGSETPGSPAGSPTSTEEGSTSSTAESPGPGTSTPESGSASPGSTSESPSGTAPGSTSESPSGTAPGTSTPESGSASPGTSTPESGSASPGSEPATSGSETPGTSESATPESGPGSPAGSPTSTEEGTSTEPSEGSAPGTSESATPESGPGTSTEPSEGSAPGTSTEPSEGSAPGSPAGSPTSTEEGTSTEPSEGSAPGTSTEPSEGSAPGTSESATPESGPGTSESATPESGPGTSTEPSEGSAPGTSTEPSEGSAPGTSESATPESGPGTSTEPSEGSAPGSEPATSGSETPGSPAGSPTSTEEGSSTPSGATGSPGTPGSGTASSSPGSSTPSGATGSPGTSTEPSEGSAPGTSTEPSEGSAPGSEPATSGSETPGSPAGSPTSTEEGSPAGSPTSTEEGTSTEPSEGSAPGPEPTGPAPSGGSEPATSGSETPGTSESATPESGPGSPAGSPTSTEEGTSESATPESGPGSPAGSPTSTEEGSPAGSPTSTEEGTSESATPESGPGSPAGSPTSTEEGSPAGSPTSTEEGSTSSTAESPGPGSTSESPSGTAPGTSPSGESSTAPGSTSESPSGTAPGSTSESPSGTAPGTSPSGESSTAPGTSTEPSEGSAPGTSESATPESGPGTSESATPESGPGSEPATSGSETPGTSESATPESGPGTSESATPESGPGTSTEPSEGSAPGTSESATPESGPGTSTEPSEGSAPGTSPSGESSTAPGTSPSGESSTAPGTSPSGESSTAPGTSTEPSEGSAPGSPAGSPTSTEEGTSTEPSEGSAPGSSPSASTGTGPGSSTPSGATGSPGSSTPSGATGSPGSSTPSGATGSPGSSTPSGATGSPGASPGTSSTGSPGASASGAPSTGGTSPSGESSTAPGSTSSTAESPGPGTSPSGESSTAPGTSESATPESGPGTSTEPSEGSAPGTSTEPSEGSAPGSSPSASTGTGPGSSTPSGATGSPGASPGTSSTGSPGTSTPESGSASPGTSPSGESSTAPGTSPSGESSTAPGTSESATPESGPGSEPATSGSETPGTSTEPSEGSAPGSTSESPSGTAPGSTSESPSGTAPGTSTPESGSASPGSPAGSPTSTEEGTSESATPESGPGTSTEPSEGSAPGSPAGSPTSTEEGTSESATPESGPGSEPATSGSETPGSSTPSGATGSPGASPGTSSTGSPGSSTPSGATGSPGSTSESPSGTAPGTSPSGESSTAPGSTSSTAESPGPGSSTPSGATGSPGASPGTSSTGSPGTPGSGTASSSPGSPAGSPTSTEEGSPAGSPTSTEEGTSTEPSEGSAPGQLGPQGPPHLVADPSKKQGPWLEEEEEAYGWMDF

SEQ ID NO: 926 - protein, 187 aa, Artificial Sequence
  Description of Artificial Sequence: Synthetic polypeptide
YAEGTFISDYSIAMDKIHQQDFVNWLLAQKGKKNDWKHNITQGGSEPATSGSETPGTSESATPESGPGSEPATSGSETPGSPAGSPTSTEEGTSTEPSEGSAPGSEPATSGSETPGSEPATSGSETPGSEPATSGSETPGTSTEPSEGSAPGTSESATPESGPGSEPATSGSETPGTSTEPSEGSAP

SEQ ID NO: 927 - protein, 187 aa, Artificial Sequence
  Description of Artificial Sequence: Synthetic polypeptide
YAEGTFISDYSIAMDKIHQQDFVNWLLAQKGKKNDWKHNITQGGTSTPESGSASPGTSPSGESSTAPGTSPSGESSTAPGSTSSTAESPGPGSTSESPSGTAPGSTSSTAESPGPGTSPSGESSTAPGTSTPESGSASPGSTSSTAESPGPGTSPSGESSTAPGTSPSGESSTAPGTSPSGESSTAP

SEQ ID NO: 928 - protein, 331 aa, Artificial Sequence
  Description of Artificial Sequence: Synthetic polypeptide
YAEGTFISDYSIAMDKIHQQDFVNWLLAQKGKKNDWKHNITQGGTSESATPESGPGSEPATSGSETPGTSESATPESGPGSEPATSGSETPGTSESATPESGPGTSTEPSEGSAPGSPAGSPTSTEEGTSESATPESGPGSEPATSGSETPGTSESATPESGPGSPAGSPTSTEEGSPAGSPTSTEEGTSTEPSEGSAPGTSESATPESGPGTSESATPESGPGTSESATPESGPGSEPATSGSETPGSEPATSGSETPGSPAGSPTSTEEGTSTEPSEGSAPGTSTEPSEGSAPGSEPATSGSETPGTSESATPESGPGTSTEPSEGSAP

SEQ ID NO: 929 - protein, 619 aa, Artificial Sequence
  Description of Artificial Sequence: Synthetic polypeptide
YAEGTFISDYSIAMDKIHQQDFVNWLLAQKGKKNDWKHNITQGGSPAGSPTSTEEGTSESATPESGPGTSTEPSEGSAPGSPAGSPTSTEEGTSTEPSEGSAPGTSTEPSEGSAPGTSESATPESGPGSEPATSGSETPGSEPATSGSETPGSPAGSPTSTEEGTSESATPESGPGTSTEPSEGSAPGTSTEPSEGSAPGSPAGSPTSTEEGTSTEPSEGSAPGTSTEPSEGSAPGTSESATPESGPGTSTEPSEGSAPGTSESATPESGPGSEPATSGSETPGTSTEPSEGSAPGTSTEPSEGSAPGTSESATPESGPGTSESATPESGPGSPAGSPTSTEEGTSESATPESGPGSEPATSGSETPGTSESATPESGPGTSTEPSEGSAPGTSTEPSEGSAPGTSTEPSEGSAPGTSTEPSEGSAPGTSTEPSEGSAPGTSTEPSEGSAPGSPAGSPTSTEEGTSTEPSEGSAPGTSESATPESGPGSEPATSGSETPGTSESATPESGPGSEPATSGSETPGTSESATPESGPGTSTEPSEGSAPGTSESATPESGPGSPAGSPTSTEEGSPAGSPTSTEEGSPAGSPTSTEEGTSESATPESGPGTSTEPSEGSAP

SEQ ID NO: 930 - protein, 619 aa, Artificial Sequence
  Description of Artificial Sequence: Synthetic polypeptide
YAEGTFISDYSIAMDKIHQQDFVNWLLAQKGKKNDWKHNITQGGSTSSTAESPGPGSTSSTAESPGPGSTSESPSGTAPGSTSSTAESPGPGSTSSTAESPGPGTSTPESGSASPGSTSESPSGTAPGTSPSGESSTAPGSTSESPSGTAPGSTSESPSGTAPGTSPSGESSTAPGSTSESPSGTAPGSTSESPSGTAPGTSPSGESSTAPGSTSESPSGTAPGSTSESPSGTAPGSTSESPSGTAPGTSTPESGSASPGSTSESPSGTAPGTSTPESGSASPGSTSSTAESPGPGSTSSTAESPGPGTSTPESGSASPGTSTPESGSASPGSTSESPSGTAPGTSTPESGSASPGTSTPESGSASPGSTSESPSGTAPGSTSESPSGTAPGSTSESPSGTAPGSTSSTAESPGPGTSTPESGSASPGTSTPESGSASPGSTSESPSGTAPGSTSESPSGTAPGTSTPESGSASPGSTSESPSGTAPGSTSESPSGTAPGTSTPESGSASPGTSPSGESSTAPGSTSSTAESPGPGTSPSGESSTAPGSTSSTAESPGPGTSTPESGSASPGSTSESPSGTAPGSTSSTAESPGPGTSTPESGSASPGTSTPESGSASP

SEQ ID NO: 931 - protein, 879 aa, Artificial Sequence
  Description of Artificial Sequence: Synthetic polypeptide
YAEGTFISDYSIAMDKIHQQDFVNWLLAQKGKKNDWKHNITQGGSSESGSSEGGPGSSESGSSEGGPGESPGGSSGSESGSGGEPSESGSSGESPGGSSGSESGESPGGSSGSESGSSESGSSEGGPGSSESGSSEGGPGSSESGSSEGGPGESPGGSSGSESGESPGGSSGSESGESPGGSSGSESGSSESGSSEGGPGSSESGSSEGGPGSSESGSSEGGPGSSESGSSEGGPGSSESGSSEGGPGSSESGSSEGGPGSGGEPSESGSSGESPGGSSGSESGESPGGSSGSESGSGGEPSESGSSGSEGSSGPGESSGSSESGSSEGGPGSGGEPSESGSSGSEGSSGPGESSGSSESGSSEGGPGSGGEPSESGSSGESPGGSSGSESGSGGEPSESGSSGSGGEPSESGSSGSSESGSSEGGPGSGGEPSESGSSGSGGEPSESGSSGSEGSSGPGESSGESPGGSSGSESGSEGSSGPGESSGSEGSSGPGESSGSGGEPSESGSSGSSESGSSEGGPGSSESGSSEGGPGESPGGSSGSESGSGGEPSESGSSGSEGSSGPGESSGESPGGSSGSESGSEGSSGPGSSESGSSEGGPGSGGEPSESGSSGSEGSSGPGESSGSEGSSGPGESSGSEGSSGPGESSGSGGEPSESGSSGSGGEPSESGSSGESPGGSSGSESGESPGGSSGSESGSGGEPSESGSSGSEGSSGPGESSGESPGGSSGSESGSSESGSSEGGPGSSESGSSEGGPGSSESGSSEGGPGSGGEPSESGSSGSSESGSSEGGPGESPGGSSGSESGSGGEPSESGSSGSSESGSSEGGPGESPGGSSGSESGSGGEPSESGSSGESPGGSSGSESGSGGEPSESGSS

SEQ ID NO: 932 - protein, 907 aa, Artificial Sequence
  Description of Artificial Sequence: Synthetic polypeptide
YAEGTFISDYSIAMDKIHQQDFVNWLLAQKGKKNDWKHNITQGGSPAGSPTSTEEGTSESATPESGPGTSTEPSEGSAPGSPAGSPTSTEEGTSTEPSEGSAPGTSTEPSEGSAPGTSESATPESGPGSEPATSGSETPGSEPATSGSETPGSPAGSPTSTEEGTSESATPESGPGTSTEPSEGSAPGTSTEPSEGSAPGSPAGSPTSTEEGTSTEPSEGSAPGTSTEPSEGSAPGTSESATPESGPGTSTEPSEGSAPGTSESATPESGPGSEPATSGSETPGTSTEPSEGSAPGTSTEPSEGSAPGTSESATPESGPGTSESATPESGPGSPAGSPTSTEEGTSESATPESGPGSEPATSGSETPGTSESATPESGPGTSTEPSEGSAPGTSTEPSEGSAPGTSTEPSEGSAPGTSTEPSEGSAPGTSTEPSEGSAPGTSTEPSEGSAPGSPAGSPTSTEEGTSTEPSEGSAPGTSESATPESGPGSEPATSGSETPGTSESATPESGPGSEPATSGSETPGTSESATPESGPGTSTEPSEGSAPGTSESATPESGPGSPAGSPTSTEEGSPAGSPTSTEEGSPAGSPTSTEEGTSESATPESGPGTSTEPSEGSAPGTSESATPESGPGSEPATSGSETPGTSESATPESGPGSEPATSGSETPGTSESATPESGPGTSTEPSEGSAPGSPAGSPTSTEEGTSESATPESGPGSEPATSGSETPGTSESATPESGPGSPAGSPTSTEEGSPAGSPTSTEEGTSTEPSEGSAPGTSESATPESGPGTSESATPESGPGTSESATPESGPGSEPATSGSETPGSEPATSGSETPGSPAGSPTSTEEGTSTEPSEGSAPGTSTEPSEGSAPGSEPATSGSETPGTSESATPESGPGTSTEPSEGSAP

SEQ ID NO: 933 - protein, 918 aa, Artificial Sequence
  Description of Artificial Sequence: Synthetic polypeptide
  MOD_RES (473)..(475): Any amino acid
  MOD_RES (486)..(489): Any amino acid
YAEGTFISDYSIAMDKIHQQDFVNWLLAQKGKKNDWKHNITQGGSTSESPSGTAPGTSPSGESSTAPGSTSESPSGTAPGSTSESPSGTAPGTSTPESGSASPGTSTPESGSASPGSTSESPSGTAPGSTSESPSGTAPGTSPSGESSTAPGSTSESPSGTAPGTSPSGESSTAPGTSPSGESSTAPGSTSSTAESPGPGTSPSGESSTAPGTSPSGESSTAPGSTSSTAESPGPGTSTPESGSASPGTSTPESGSASPGSTSESPSGTAPGSTSESPSGTAPGTSTPESGSASPGSTSSTAESPGPGTSTPESGSASPGSTSESPSGTAPGTSPSGESSTAPGSTSSTAESPGPGTSPSGESSTAPGTSTPESGSASPGSTSSTAESPGPGSTSSTAESPGPGSTSSTAESPGPGSTSSTAESPGPGTSPSGESSTAPGSTSESPSGTAPGSTSESPSGTAPGTSTPESGPXXXGASASGAPSTXXXXSESPSGTAPGSTSESPSGTAPGSTSESPSGTAPGSTSESPSGTAPGSTSESPSGTAPGSTSESPSGTAPGTSTPESGSASPGTSPSGESSTAPGTSPSGESSTAPGSTSSTAESPGPGTSPSGESSTAPGTSTPESGSASPGSTSESPSGTAPGSTSESPSGTAPGTSPSGESSTAPGSTSESPSGTAPGTSTPESGSASPGTSTPESGSASPGSTSESPSGTAPGTSTPESGSASPGSTSSTAESPGPGSTSESPSGTAPGSTSESPSGTAPGTSPSGESSTAPGSTSSTAESPGPGTSPSGESSTAPGTSTPESGSASPGTSPSGESSTAPGTSPSGESSTAPGTSPSGESSTAPGSTSSTAESPGPGSTSSTAESPGPGTSPSGESSTAPGSSPSASTGTGPGSSTPSGATGSPGSSTPSGATGSP

SEQ ID NO: 934 - protein, 907 aa, Artificial Sequence
  Description of Artificial Sequence: Synthetic polypeptide
YAEGTFISDYSIAMDKIHQQDFVNWLLAQKGKKNDWKHNITQGGASPGTSSTGSPGSSPSASTGTGPGSSPSASTGTGPGTPGSGTASSSPGSSTPSGATGSPGSNPSASTGTGPGASPGTSSTGSPGTPGSGTASSSPGSSTPSGATGSPGTPGSGTASSSPGASPGTSSTGSPGASPGTSSTGSPGTPGSGTASSSPGSSTPSGATGSPGASPGTSSTGSPGTPGSGTASSSPGSSTPSGATGSPGSNPSASTGTGPGSSPSASTGTGPGSSTPSGATGSPGSSTPSGATGSPGASPGTSSTGSPGASPGTSSTGSPGASPGTSSTGSPGTPGSGTASSSPGASPGTSSTGSPGASPGTSSTGSPGASPGTSSTGSPGSSPSASTGTGPGTPGSGTASSSPGASPGTSSTGSPGASPGTSSTGSPGASPGTSSTGSPGSSTPSGATGSPGSSTPSGATGSPGASPGTSSTGSPGTPGSGTASSSPGSSTPSGATGSPGSSTPSGATGSPGSSTPSGATGSPGSSPSASTGTGPGASPGTSSTGSPGASPGTSSTGSPGTPGSGTASSSPGASPGTSSTGSPGASPGTSSTGSPGASPGTSSTGSPGASPGTSSTGSPGTPGSGTASSSPGSSTPSGATGSPGTPGSGTASSSPGSSTPSGATGSPGTPGSGTASSSPGSSTPSGATGSPGSSTPSGATGSPGSSPSASTGTGPGSSPSASTGTGPGASPGTSSTGSPGTPGSGTASSSPGSSTPSGATGSPGSSPSASTGTGPGSSPSASTGTGPGASPGTSSTGSPGASPGTSSTGSPGSSTPSGATGSPGSSPSASTGTGPGASPGTSSTGSPGSSPSASTGTGPGTPGSGTASSSPGSSTPSGATGSPGSSTPSGATGSPGASPGTSSTGSP

SEQ ID NO: 935 - protein, 918 aa, Artificial Sequence
  Description of Artificial Sequence: Synthetic polypeptide
YAEGTFISDYSIAMDKIHQQDFVNWLLAQKGKKNDWKHNITQGGTSTEPSEGSAPGSEPATSGSETPGSPAGSPTSTEEGSTSSTAESPGPGTSTPESGSASPGSTSESPSGTAPGSTSESPSGTAPGTSTPESGSASPGTSTPESGSASPGSEPATSGSETPGTSESATPESGPGSPAGSPTSTEEGTSTEPSEGSAPGTSESATPESGPGTSTEPSEGSAPGTSTEPSEGSAPGSPAGSPTSTEEGTSTEPSEGSAPGTSTEPSEGSAPGTSESATPESGPGTSESATPESGPGTSTEPSEGSAPGTSTEPSEGSAPGTSESATPESGPGTSTEPSEGSAPGSEPATSGSETPGSPAGSPTSTEEGSSTPSGATGSPGTPGSGTASSSPGSSTPSGATGSPGTSTEPSEGSAPGTSTEPSEGSAPGSEPATSGSETPGSPAGSPTSTEEGSPAGSPTSTEEGTSTEPSEGSAPGASASGAPSTGGTSESATPESGPGSPAGSPTSTEEGSPAGSPTSTEEGSTSSTAESPGPGSTSESPSGTAPGTSPSGESSTAPGTPGSGTASSSPGSSTPSGATGSPGSSPSASTGTGPGSEPATSGSETPGTSESATPESGPGSEPATSGSETPGSTSSTAESPGPGSTSSTAESPGPGTSPSGESSTAPGSEPATSGSETPGSEPATSGSETPGTSTEPSEGSAPGSTSSTAESPGPGTSTPESGSASPGSTSESPSGTAPGTSTEPSEGSAPGTSTEPSEGSAPGTSTEPSEGSAPGSSTPSGATGSPGSSPSASTGTGPGASPGTSSTGSPGSEPATSGSETPGTSESATPESGPGSPAGSPTSTEEGSSTPSGATGSPGSSPSASTGTGPGASPGTSSTGSPGTSESATPESGPGTSTEPSEGSAPGTSTEPSEGSAP

SEQ ID NO: 936 - protein, 1361 aa, Artificial Sequence
  Description of Artificial Sequence: Synthetic polypeptide
YAEGTFISDYSIAMDKIHQQDFVNWLLAQKGKKNDWKHNITQGGTSTEPSEGSAPGSEPATSGSETPGSPAGSPTSTEEGSTSSTAESPGPGTSTPESGSASPGSTSESPSGTAPGSTSESPSGTAPGTSTPESGSASPGTSTPESGSASPGSEPATSGSETPGTSESATPESGPGSPAGSPTSTEEGTSTEPSEGSAPGTSESATPESGPGTSTEPSEGSAPGTSTEPSEGSAPGSPAGSPTSTEEGTSTEPSEGSAPGTSTEPSEGSAPGTSESATPESGPGTSESATPESGPGTSTEPSEGSAPGTSTEPSEGSAPGTSESATPESGPGTSTEPSEGSAPGSEPATSGSETPGSPAGSPTSTEEGSSTPSGATGSPGTPGSGTASSSPGSSTPSGATGSPGTSTEPSEGSAPGTSTEPSEGSAPGSEPATSGSETPGSPAGSPTSTEEGSPAGSPTSTEEGTSTEPSEGSAPGPEPTGPAPSGGSEPATSGSETPGTSESATPESGPGSPAGSPTSTEEGTSESATPESGPGSPAGSPTSTEEGSPAGSPTSTEEGTSESATPESGPGSPAGSPTSTEEGSPAGSPTSTEEGSTSSTAESPGPGSTSESPSGTAPGTSPSGESSTAPGSTSESPSGTAPGSTSESPSGTAPGTSPSGESSTAPGTSTEPSEGSAPGTSESATPESGPGTSESATPESGPGSEPATSGSETPGTSESATPESGPGTSESATPESGPGTSTEPSEGSAPGTSESATPESGPGTSTEPSEGSAPGTSPSGESSTAPGTSPSGESSTAPGTSPSGESSTAPGTSTEPSEGSAPGSPAGSPTSTEEGTSTEPSEGSAPGSSPSASTGTGPGSSTPSGATGSPGSSTPSGATGSPGSSTPSGATGSPGSSTPSGATGSPGASPGTSSTGSPGASASGAPSTGGTSPSGESSTAPGSTSSTAESPGPGTSPSGESSTAPGTSESATPESGPGTSTEPSEGSAPGTSTEPSEGSAPGSSPSASTGTGPGSSTPSGATGSPGASPGTSSTGSPGTSTPESGSASPGTSPSGESSTAPGTSPSGESSTAPGTSESATPESGPGSEPATSGSETPGTSTEPSEGSAPGSTSESPSGTAPGSTSESPSGTAPGTSTPESGSASPGSPAGSPTSTEEGTSESATPESGPGTSTEPSEGSAPGSPAGSPTSTEEGTSESATPESGPGSEPATSGSETPGSSTPSGATGSPGASPGTSSTGSPGSSTPSGATGSPGSTSESPSGTAPGTSPSGESSTAPGSTSSTAESPGPGSSTPSGATGSPGASPGTSSTGSPGTPGSGTASSSPGSPAGSPTSTEEGSPAGSPTSTEEGTSTEPSEGSAP

SEQ ID NO: 937 - protein, 956 aa, Artificial Sequence
  Description of Artificial Sequence: Synthetic polypeptide
MAEPAGSPTSTEEGTPGSGTASSSPGSSTPSGATGSPGASPGTSSTGSPGSPAGSPTSTEEGTSESATPESGPGTSTEPSEGSAPGSPAGSPTSTEEGTSTEPSEGSAPGTSTEPSEGSAPGTSESATPESGPGSEPATSGSETPGSEPATSGSETPGSPAGSPTSTEEGTSESATPESGPGTSTEPSEGSAPGTSTEPSEGSAPGSPAGSPTSTEEGTSTEPSEGSAPGTSTEPSEGSAPGTSESATPESGPGTSTEPSEGSAPGTSESATPESGPGSEPATSGSETPGTSTEPSEGSAPGTSTEPSEGSAPGTSESATPESGPGTSESATPESGPGSPAGSPTSTEEGTSESATPESGPGSEPATSGSETPGTSESATPESGPGTSTEPSEGSAPGTSTEPSEGSAPGTSTEPSEGSAPGTSTEPSEGSAPGTSTEPSEGSAPGTSTEPSEGSAPGSPAGSPTSTEEGTSTEPSEGSAPGTSESATPESGPGSEPATSGSETPGTSESATPESGPGSEPATSGSETPGTSESATPESGPGTSTEPSEGSAPGTSESATPESGPGSPAGSPTSTEEGSPAGSPTSTEEGSPAGSPTSTEEGTSESATPESGPGTSTEPSEGSAPGTSESATPESGPGSEPATSGSETPGTSESATPESGPGSEPATSGSETPGTSESATPESGPGTSTEPSEGSAPGSPAGSPTSTEEGTSESATPESGPGSEPATSGSETPGTSESATPESGPGSPAGSPTSTEEGSPAGSPTSTEEGTSTEPSEGSAPGTSESATPESGPGTSESATPESGPGTSESATPESGPGSEPATSGSETPGSEPATSGSETPGSPAGSPTSTEEGTSTEPSEGSAPGTSTEPSEGSAPGSEPATSGSETPGTSESATPESGPGTSTEPSEGSAPGYAEGTFISDYSIAMDKIHQQDFVNWLLAQKGKKNDWKHNITQ

SEQ ID NO: 938 - protein, 967 aa, Artificial Sequence
  Description of Artificial Sequence: Synthetic polypeptide
MAEPAGSPTSTEEGASPGTSSTGSPGSSTPSGATGSPGSSTPSGATGSPGTSTEPSEGSAPGSEPATSGSETPGSPAGSPTSTEEGSTSSTAESPGPGTSTPESGSASPGSTSESPSGTAPGSTSESPSGTAPGTSTPESGSASPGTSTPESGSASPGSEPATSGSETPGTSESATPESGPGSPAGSPTSTEEGTSTEPSEGSAPGTSESATPESGPGTSTEPSEGSAPGTSTEPSEGSAPGSPAGSPTSTEEGTSTEPSEGSAPGTSTEPSEGSAPGTSESATPESGPGTSESATPESGPGTSTEPSEGSAPGTSTEPSEGSAPGTSESATPESGPGTSTEPSEGSAPGSEPATSGSETPGSPAGSPTSTEEGSSTPSGATGSPGTPGSGTASSSPGSSTPSGATGSPGTSTEPSEGSAPGTSTEPSEGSAPGSEPATSGSETPGSPAGSPTSTEEGSPAGSPTSTEEGTSTEPSEGSAPGASASGAPSTGGTSESATPESGPGSPAGSPTSTEEGSPAGSPTSTEEGSTSSTAESPGPGSTSESPSGTAPGTSPSGESSTAPGTPGSGTASSSPGSSTPSGATGSPGSSPSASTGTGPGSEPATSGSETPGTSESATPESGPGSEPATSGSETPGSTSSTAESPGPGSTSSTAESPGPGTSPSGESSTAPGSEPATSGSETPGSEPATSGSETPGTSTEPSEGSAPGSTSSTAESPGPGTSTPESGSASPGSTSESPSGTAPGTSTEPSEGSAPGTSTEPSEGSAPGTSTEPSEGSAPGSSTPSGATGSPGSSPSASTGTGPGASPGTSSTGSPGSEPATSGSETPGTSESATPESGPGSPAGSPTSTEEGSSTPSGATGSPGSSPSASTGTGPGASPGTSSTGSPGTSESATPESGPGTSTEPSEGSAPGTSTEPSEGSAPGYAEGTFISDYSIAMDKIHQQDFVNWLLAQKGKKNDWKHNITQ

SEQ ID NO: 939 - protein, 187 aa, Artificial Sequence
  Description of Artificial Sequence: Synthetic polypeptide
GSEPATSGSETPGTSESATPESGPGSEPATSGSETPGSPAGSPTSTEEGTSTEPSEGSAPGSEPATSGSETPGSEPATSGSETPGSEPATSGSETPGTSTEPSEGSAPGTSESATPESGPGSEPATSGSETPGTSTEPSEGSAPGYAEGTFISDYSIAMDKIHQQDFVNWLLAQKGKKNDWKHNITQ

SEQ ID NO: 940 - protein, 187 aa, Artificial Sequence
  Description of Artificial Sequence: Synthetic polypeptide
GTSTPESGSASPGTSPSGESSTAPGTSPSGESSTAPGSTSSTAESPGPGSTSESPSGTAPGSTSSTAESPGPGTSPSGESSTAPGTSTPESGSASPGSTSSTAESPGPGTSPSGESSTAPGTSPSGESSTAPGTSPSGESSTAPGYAEGTFISDYSIAMDKIHQQDFVNWLLAQKGKKNDWKHNITQ

SEQ ID NO: 941 - protein, 331 aa, Artificial Sequence
  Description of Artificial Sequence: Synthetic polypeptide
GTSESATPESGPGSEPATSGSETPGTSESATPESGPGSEPATSGSETPGTSESATPESGPGTSTEPSEGSAPGSPAGSPTSTEEGTSESATPESGPGSEPATSGSETPGTSESATPESGPGSPAGSPTSTEEGSPAGSPTSTEEGTSTEPSEGSAPGTSESATPESGPGTSESATPESGPGTSESATPESGPGSEPATSGSETPGSEPATSGSETPGSPAGSPTSTEEGTSTEPSEGSAPGTSTEPSEGSAPGSEPATSGSETPGTSESATPESGPGTSTEPSEGSAPGYAEGTFISDYSIAMDKIHQQDFVNWLLAQKGKKNDWKHNITQ

SEQ ID NO: 942 - protein, 619 aa, Artificial Sequence
  Description of Artificial Sequence: Synthetic polypeptide
GSPAGSPTSTEEGTSESATPESGPGTSTEPSEGSAPGSPAGSPTSTEEGTSTEPSEGSAPGTSTEPSEGSAPGTSESATPESGPGSEPATSGSETPGSEPATSGSETPGSPAGSPTSTEEGTSESATPESGPGTSTEPSEGSAPGTSTEPSEGSAPGSPAGSPTSTEEGTSTEPSEGSAPGTSTEPSEGSAPGTSESATPESGPGTSTEPSEGSAPGTSESATPESGPGSEPATSGSETPGTSTEPSEGSAPGTSTEPSEGSAPGTSESATPESGPGTSESATPESGPGSPAGSPTSTEEGTSESATPESGPGSEPATSGSETPGTSESATPESGPGTSTEPSEGSAPGTSTEPSEGSAPGTSTEPSEGSAPGTSTEPSEGSAPGTSTEPSEGSAPGTSTEPSEGSAPGSPAGSPTSTEEGTSTEPSEGSAPGTSESATPESGPGSEPATSGSETPGTSESATPESGPGSEPATSGSETPGTSESATPESGPGTSTEPSEGSAPGTSESATPESGPGSPAGSPTSTEEGSPAGSPTSTEEGSPAGSPTSTEEGTSESATPESGPGTSTEPSEGSAPGYAEGTFISDYSIAMDKIHQQDFVNWLLAQKGKKNDWKHNITQ

SEQ ID NO: 943 - protein, 619 aa, Artificial Sequence
  Description of Artificial Sequence: Synthetic polypeptide
GSTSSTAESPGPGSTSSTAESPGPGSTSESPSGTAPGSTSSTAESPGPGSTSSTAESPGPGTSTPESGSASPGSTSESPSGTAPGTSPSGESSTAPGSTSESPSGTAPGSTSESPSGTAPGTSPSGESSTAPGSTSESPSGTAPGSTSESPSGTAPGTSPSGESSTAPGSTSESPSGTAPGSTSESPSGTAPGSTSESPSGTAPGTSTPESGSASPGSTSESPSGTAPGTSTPESGSASPGSTSSTAESPGPGSTSSTAESPGPGTSTPESGSASPGTSTPESGSASPGSTSESPSGTAPGTSTPESGSASPGTSTPESGSASPGSTSESPSGTAPGSTSESPSGTAPGSTSESPSGTAPGSTSSTAESPGPGTSTPESGSASPGTSTPESGSASPGSTSESPSGTAPGSTSESPSGTAPGTSTPESGSASPGSTSESPSGTAPGSTSESPSGTAPGTSTPESGSASPGTSPSGESSTAPGSTSSTAESPGPGTSPSGESSTAPGSTSSTAESPGPGTSTPESGSASPGSTSESPSGTAPGSTSSTAESPGPGTSTPESGSASPGTSTPESGSASPGYAEGTFISDYSIAMDKIHQQDFVNWLLAQKGKKNDWKHNITQ

SEQ ID NO: 944 - protein, 879 aa, Artificial Sequence
  Description of Artificial Sequence: Synthetic polypeptide
GSSESGSSEGGPGSSESGSSEGGPGESPGGSSGSESGSGGEPSESGSSGESPGGSSGSESGESPGGSSGSESGSSESGSSEGGPGSSESGSSEGGPGSSESGSSEGGPGESPGGSSGSESGESPGGSSGSESGESPGGSSGSESGSSESGSSEGGPGSSESGSSEGGPGSSESGSSEGGPGSSESGSSEGGPGSSESGSSEGGPGSSESGSSEGGPGSGGEPSESGSSGESPGGSSGSESGESPGGSSGSESGSGGEPSESGSSGSEGSSGPGESSGSSESGSSEGGPGSGGEPSESGSSGSEGSSGPGESSGSSESGSSEGGPGSGGEPSESGSSGESPGGSSGSESGSGGEPSESGSSGSGGEPSESGSSGSSESGSSEGGPGSGGEPSESGSSGSGGEPSESGSSGSEGSSGPGESSGESPGGSSGSESGSEGSSGPGESSGSEGSSGPGESSGSGGEPSESGSSGSSESGSSEGGPGSSESGSSEGGPGESPGGSSGSESGSGGEPSESGSSGSEGSSGPGESSGESPGGSSGSESGSEGSSGPGSSESGSSEGGPGSGGEPSESGSSGSEGSSGPGESSGSEGSSGPGESSGSEGSSGPGESSGSGGEPSESGSSGSGGEPSESGSSGESPGGSSGSESGESPGGSSGSESGSGGEPSESGSSGSEGSSGPGESSGESPGGSSGSESGSSESGSSEGGPGSSESGSSEGGPGSSESGSSEGGPGSGGEPSESGSSGSSESGSSEGGPGESPGGSSGSESGSGGEPSESGSSGSSESGSSEGGPGESPGGSSGSESGSGGEPSESGSSGESPGGSSGSESGSGGEPSESGSSGYAEGTFISDYSIAMDKIHQQDFVNWLLAQKGKKNDWKHNITQ

SEQ ID NO: 945 - protein, 907 aa, Artificial Sequence
  Description of Artificial Sequence: Synthetic polypeptide
GSPAGSPTSTEEGTSESATPESGPGTSTEPSEGSAPGSPAGSPTSTEEGTSTEPSEGSAPGTSTEPSEGSAPGTSESATPESGPGSEPATSGSETPGSEPATSGSETPGSPAGSPTSTEEGTSESATPESGPGTSTEPSEGSAPGTSTEPSEGSAPGSPAGSPTSTEEGTSTEPSEGSAPGTSTEPSEGSAPGTSESATPESGPGTSTEPSEGSAPGTSESATPESGPGSEPATSGSETPGTSTEPSEGSAPGTSTEPSEGSAPGTSESATPESGPGTSESATPESGPGSPAGSPTSTEEGTSESATPESGPGSEPATSGSETPGTSESATPESGPGTSTEPSEGSAPGTSTEPSEGSAPGTSTEPSEGSAPGTSTEPSEGSAPGTSTEPSEGSAPGTSTEPSEGSAPGSPAGSPTSTEEGTSTEPSEGSAPGTSESATPESGPGSEPATSGSETPGTSESATPESGPGSEPATSGSETPGTSESATPESGPGTSTEPSEGSAPGTSESATPESGPGSPAGSPTSTEEGSPAGSPTSTEEGSPAGSPTSTEEGTSESATPESGPGTSTEPSEGSAPGTSESATPESGPGSEPATSGSETPGTSESATPESGPGSEPATSGSETPGTSESATPESGPGTSTEPSEGSAPGSPAGSPTSTEEGTSESATPESGPGSEPATSGSETPGTSESATPESGPGSPAGSPTSTEEGSPAGSPTSTEEGTSTEPSEGSAPGTSESATPESGPGTSESATPESGPGTSESATPESGPGSEPATSGSETPGSEPATSGSETPGSPAGSPTSTEEGTSTEPSEGSAPGTSTEPSEGSAPGSEPATSGSETPGTSESATPESGPGTSTEPSEGSAPGYAEGTFISDYSIAMDKIHQQDFVNWLLAQKGKKNDWKHNITQ

SEQ ID NO: 946 - protein, 918 aa, Artificial Sequence
  Description of Artificial Sequence: Synthetic polypeptide
  MOD_RES (430)..(432): Any amino acid
  MOD_RES (443)..(446): Any amino acid
GSTSESPSGTAPGTSPSGESSTAPGSTSESPSGTAPGSTSESPSGTAPGTSTPESGSASPGTSTPESGSASPGSTSESPSGTAPGSTSESPSGTAPGTSPSGESSTAPGSTSESPSGTAPGTSPSGESSTAPGTSPSGESSTAPGSTSSTAESPGPGTSPSGESSTAPGTSPSGESSTAPGSTSSTAESPGPGTSTPESGSASPGTSTPESGSASPGSTSESPSGTAPGSTSESPSGTAPGTSTPESGSASPGSTSSTAESPGPGTSTPESGSASPGSTSESPSGTAPGTSPSGESSTAPGSTSSTAESPGPGTSPSGESSTAPGTSTPESGSASPGSTSSTAESPGPGSTSSTAESPGPGSTSSTAESPGPGSTSSTAESPGPGTSPSGESSTAPGSTSESPSGTAPGSTSESPSGTAPGTSTPESGPXXXGASASGAPSTXXXXSESPSGTAPGSTSESPSGTAPGSTSESPSGTAPGSTSESPSGTAPGSTSESPSGTAPGSTSESPSGTAPGTSTPESGSASPGTSPSGESSTAPGTSPSGESSTAPGSTSSTAESPGPGTSPSGESSTAPGTSTPESGSASPGSTSESPSGTAPGSTSESPSGTAPGTSPSGESSTAPGSTSESPSGTAPGTSTPESGSASPGTSTPESGSASPGSTSESPSGTAPGTSTPESGSASPGSTSSTAESPGPGSTSESPSGTAPGSTSESPSGTAPGTSPSGESSTAPGSTSSTAESPGPGTSPSGESSTAPGTSTPESGSASPGTSPSGESSTAPGTSPSGESSTAPGTSPSGESSTAPGSTSSTAESPGPGSTSSTAESPGPGTSPSGESSTAPGSSPSASTGTGPGSSTPSGATGSPGSSTPSGATGSPGYAEGTFISDYSIAMDKIHQQDFVNWLLAQKGKKNDWKHNITQ

SEQ ID NO: 947 - protein, 907 aa, Artificial Sequence
  Description of Artificial Sequence: Synthetic polypeptide
GASPGTSSTGSPGSSPSASTGTGPGSSPSASTGTGPGTPGSGTASSSPGSSTPSGATGSPGSNPSASTGTGPGASPGTSSTGSPGTPGSGTASSSPGSSTPSGATGSPGTPGSGTASSSPGASPGTSSTGSPGASPGTSSTGSPGTPGSGTASSSPGSSTPSGATGSPGASPGTSSTGSPGTPGSGTASSSPGSSTPSGATGSPGSNPSASTGTGPGSSPSASTGTGPGSSTPSGATGSPGSSTPSGATGSPGASPGTSSTGSPGASPGTSSTGSPGASPGTSSTGSPGTPGSGTASSSPGASPGTSSTGSPGASPGTSSTGSPGASPGTSSTGSPGSSPSASTGTGPGTPGSGTASSSPGASPGTSSTGSPGASPGTSSTGSPGASPGTSSTGSPGSSTPSGATGSPGSSTPSGATGSPGASPGTSSTGSPGTPGSGTASSSPGSSTPSGATGSPGSSTPSGATGSPGSSTPSGATGSPGSSPSASTGTGPGASPGTSSTGSPGASPGTSSTGSPGTPGSGTASSSPGASPGTSSTGSPGASPGTSSTGSPGASPGTSSTGSPGASPGTSSTGSPGTPGSGTASSSPGSSTPSGATGSPGTPGSGTASSSPGSSTPSGATGSPGTPGSGTASSSPGSSTPSGATGSPGSSTPSGATGSPGSSPSASTGTGPGSSPSASTGTGPGASPGTSSTGSPGTPGSGTASSSPGSSTPSGATGSPGSSPSASTGTGPGSSPSASTGTGPGASPGTSSTGSPGASPGTSSTGSPGSSTPSGATGSPGSSPSASTGTGPGASPGTSSTGSPGSSPSASTGTGPGTPGSGTASSSPGSSTPSGATGSPGSSTPSGATGSPGASPGTSSTGSPGYAEGTFISDYSIAMDKIHQQDFVNWLLAQKGKKNDWKHNITQ

SEQ ID NO: 948 - protein, 918 aa, Artificial Sequence
  Description of Artificial Sequence: Synthetic polypeptide
GTSTEPSEGSAPGSEPATSGSETPGSPAGSPTSTEEGSTSSTAESPGPGTSTPESGSASPGSTSESPSGTAPGSTSESPSGTAPGTSTPESGSASPGTSTPESGSASPGSEPATSGSETPGTSESATPESGPGSPAGSPTSTEEGTSTEPSEGSAPGTSESATPESGPGTSTEPSEGSAPGTSTEPSEGSAPGSPAGSPTSTEEGTSTEPSEGSAPGTSTEPSEGSAPGTSESATPESGPGTSESATPESGPGTSTEPSEGSAPGTSTEPSEGSAPGTSESATPESGPGTSTEPSEGSAPGSEPATSGSETPGSPAGSPTSTEEGSSTPSGATGSPGTPGSGTASSSPGSSTPSGATGSPGTSTEPSEGSAPGTSTEPSEGSAPGSEPATSGSETPGSPAGSPTSTEEGSPAGSPTSTEEGTSTEPSEGSAPGASASGAPSTGGTSESATPESGPGSPAGSPTSTEEGSPAGSPTSTEEGSTSSTAESPGPGSTSESPSGTAPGTSPSGESSTAPGTPGSGTASSSPGSSTPSGATGSPGSSPSASTGTGPGSEPATSGSETPGTSESATPESGPGSEPATSGSETPGSTSSTAESPGPGSTSSTAESPGPGTSPSGESSTAPGSEPATSGSETPGSEPATSGSETPGTSTEPSEGSAPGSTSSTAESPGPGTSTPESGSASPGSTSESPSGTAPGTSTEPSEGSAPGTSTEPSEGSAPGTSTEPSEGSAPGSSTPSGATGSPGSSPSASTGTGPGASPGTSSTGSPGSEPATSGSETPGTSESATPESGPGSPAGSPTSTEEGSSTPSGATGSPGSSPSASTGTGPGASPGTSSTGSPGTSESATPESGPGTSTEPSEGSAPGTSTEPSEGSAPGYAEGTFISDYSIAMDKIHQQDFVNWLLAQKGKKNDWKHNITQ

SEQ ID NO: 949 - protein, 1361 aa, Artificial Sequence
  Description of Artificial Sequence: Synthetic polypeptide
GTSTEPSEGSAPGSEPATSGSETPGSPAGSPTSTEEGSTSSTAESPGPGTSTPESGSASPGSTSESPSGTAPGSTSESPSGTAPGTSTPESGSASPGTSTPESGSASPGSEPATSGSETPGTSESATPESGPGSPAGSPTSTEEGTSTEPSEGSAPGTSESATPESGPGTSTEPSEGSAPGTSTEPSEGSAPGSPAGSPTSTEEGTSTEPSEGSAPGTSTEPSEGSAPGTSESATPESGPGTSESATPESGPGTSTEPSEGSAPGTSTEPSEGSAPGTSESATPESGPGTSTEPSEGSAPGSEPATSGSETPGSPAGSPTSTEEGSSTPSGATGSPGTPGSGTASSSPGSSTPSGATGSPGTSTEPSEGSAPGTSTEPSEGSAPGSEPATSGSETPGSPAGSPTSTEEGSPAGSPTSTEEGTSTEPSEGSAPGPEPTGPAPSGGSEPATSGSETPGTSESATPESGPGSPAGSPTSTEEGTSESATPESGPGSPAGSPTSTEEGSPAGSPTSTEEGTSESATPESGPGSPAGSPTSTEEGSPAGSPTSTEEGSTSSTAESPGPGSTSESPSGTAPGTSPSGESSTAPGSTSESPSGTAPGSTSESPSGTAPGTSPSGESSTAPGTSTEPSEGSAPGTSESATPESGPGTSESATPESGPGSEPATSGSETPGTSESATPESGPGTSESATPESGPGTSTEPSEGSAPGTSESATPESGPGTSTEPSEGSAPGTSPSGESSTAPGTSPSGESSTAPGTSPSGESSTAPGTSTEPSEGSAPGSPAGSPTSTEEGTSTEPSEGSAPGSSPSASTGTGPGSSTPSGATGSPGSSTPSGATGSPGSSTPSGATGSPGSSTPSGATGSPGASPGTSSTGSPGASASGAPSTGGTSPSGESSTAPGSTSSTAESPGPGTSPSGESSTAPGTSESATPESGPGTSTEPSEGSAPGTSTEPSEGSAPGSSPSASTGTGPGSSTPSGATGSPGASPGTSSTGSPGTSTPESGSASPGTSPSGESSTAPGTSPSGESSTAPGTSESATPESGPGSEPATSGSETPGTSTEPSEGSAPGSTSESPSGTAPGSTSESPSGTAPGTSTPESGSASPGSPAGSPTSTEEGTSESATPESGPGTSTEPSEGSAPGSPAGSPTSTEEGTSESATPESGPGSEPATSGSETPGSSTPSGATGSPGASPGTSSTGSPGSSTPSGATGSPGSTSESPSGTAPGTSPSGESSTAPGSTSSTAESPGPGSSTPSGATGSPGASPGTSSTGSPGTPGSGTASSSPGSPAGSPTSTEEGSPAGSPTSTEEGTSTEPSEGSAPGYAEGTFISDYSIAMDKIHQQDFVNWLLAQKGKKNDWKHNITQ

SEQ ID NO: 950 - protein, 215 aa, Artificial Sequence
  Description of Artificial Sequence: Synthetic polypeptide
GPETLCGAELVDALQFVCGDRGFYFNKPTGYGSSSRRAPQTGIVDECCFRSCDLRRLEMYCAPLKPAKSAGGSEPATSGSETPGTSESATPESGPGSEPATSGSETPGSPAGSPTSTEEGTSTEPSEGSAPGSEPATSGSETPGSEPATSGSETPGSEPATSGSETPGTSTEPSEGSAPGTSESATPESGPGSEPATSGSETPGTSTEPSEGSAP

SEQ ID NO: 951 - protein, 215 aa, Artificial Sequence
  Description of Artificial Sequence: Synthetic polypeptide
GPETLCGAELVDALQFVCGDRGFYFNKPTGYGSSSRRAPQTGIVDECCFRSCDLRRLEMYCAPLKPAKSAGGTSTPESGSASPGTSPSGESSTAPGTSPSGESSTAPGSTSSTAESPGPGSTSESPSGTAPGSTSSTAESPGPGTSPSGESSTAPGTSTPESGSASPGSTSSTAESPGPGTSPSGESSTAPGTSPSGESSTAPGTSPSGESSTAP

SEQ ID NO: 952 - protein, 359 aa, Artificial Sequence
  Description of Artificial Sequence: Synthetic polypeptide
GPETLCGAELVDALQFVCGDRGFYFNKPTGYGSSSRRAPQTGIVDECCFRSCDLRRLEMYCAPLKPAKSAGGTSESATPESGPGSEPATSGSETPGTSESATPESGPGSEPATSGSETPGTSESATPESGPGTSTEPSEGSAPGSPAGSPTSTEEGTSESATPESGPGSEPATSGSETPGTSESATPESGPGSPAGSPTSTEEGSPAGSPTSTEEGTSTEPSEGSAPGTSESATPESGPGTSESATPESGPGTSESATPESGPGSEPATSGSETPGSEPATSGSETPGSPAGSPTSTEEGTSTEPSEGSAPGTSTEPSEGSAPGSEPATSGSETPGTSESATPESGPGTSTEPSEGSAP

SEQ ID NO: 953 - protein, 647 aa, Artificial Sequence
  Description of Artificial Sequence: Synthetic polypeptide
GPETLCGAELVDALQFVCGDRGFYFNKPTGYGSSSRRAPQTGIVDECCFRSCDLRRLEMYCAPLKPAKSAGGSPAGSPTSTEEGTSESATPESGPGTSTEPSEGSAPGSPAGSPTSTEEGTSTEPSEGSAPGTSTEPSEGSAPGTSESATPESGPGSEPATSGSETPGSEPATSGSETPGSPAGSPTSTEEGTSESATPESGPGTSTEPSEGSAPGTSTEPSEGSAPGSPAGSPTSTEEGTSTEPSEGSAPGTSTEPSEGSAPGTSESATPESGPGTSTEPSEGSAPGTSESATPESGPGSEPATSGSETPGTSTEPSEGSAPGTSTEPSEGSAPGTSESATPESGPGTSESATPESGPGSPAGSPTSTEEGTSESATPESGPGSEPATSGSETPGTSESATPESGPGTSTEPSEGSAPGTSTEPSEGSAPGTSTEPSEGSAPGTSTEPSEGSAPGTSTEPSEGSAPGTSTEPSEGSAPGSPAGSPTSTEEGTSTEPSEGSAPGTSESATPESGPGSEPATSGSETPGTSESATPESGPGSEPATSGSETPGTSESATPESGPGTSTEPSEGSAPGTSESATPESGPGSPAGSPTSTEEGSPAGSPTSTEEGSPAGSPTSTEEGTSESATPESGPGTSTEPSEGSAP

SEQ ID NO: 954 - protein, 647 aa, Artificial Sequence
  Description of Artificial Sequence: Synthetic polypeptide
GPETLCGAELVDALQFVCGDRGFYFNKPTGYGSSSRRAPQTGIVDECCFRSCDLRRLEMYCAPLKPAKSAGGSTSSTAESPGPGSTSSTAESPGPGSTSESPSGTAPGSTSSTAESPGPGSTSSTAESPGPGTSTPESGSASPGSTSESPSGTAPGTSPSGESSTAPGSTSESPSGTAPGSTSESPSGTAPGTSPSGESSTAPGSTSESPSGTAPGSTSESPSGTAPGTSPSGESSTAPGSTSESPSGTAPGSTSESPSGTAPGSTSESPSGTAPGTSTPESGSASPGSTSESPSGTAPGTSTPESGSASPGSTSSTAESPGPGSTSSTAESPGPGTSTPESGSASPGTSTPESGSASPGSTSESPSGTAPGTSTPESGSASPGTSTPESGSASPGSTSESPSGTAPGSTSESPSGTAPGSTSESPSGTAPGSTSSTAESPGPGTSTPESGSASPGTSTPESGSASPGSTSESPSGTAPGSTSESPSGTAPGTSTPESGSASPGSTSESPSGTAPGSTSESPSGTAPGTSTPESGSASPGTSPSGESSTAPGSTSSTAESPGPGTSPSGESSTAPGSTSSTAESPGPGTSTPESGSASPGSTSESPSGTAPGSTSSTAESPGPGTSTPESGSASPGTSTPESGSASP

SEQ ID NO: 955 - protein, 907 aa, Artificial Sequence
  Description of Artificial Sequence: Synthetic polypeptide
GPETLCGAELVDALQFVCGDRGFYFNKPTGYGSSSRRAPQTGIVDECCFRSCDLRRLEMYCAPLKPAKSAGGSSESGSSEGGPGSSESGSSEGGPGESPGGSSGSESGSGGEPSESGSSGESPGGSSGSESGESPGGSSGSESGSSESGSSEGGPGSSESGSSEGGPGSSESGSSEGGPGESPGGSSGSESGESPGGSSGSESGESPGGSSGSESGSSESGSSEGGPGSSESGSSEGGPGSSESGSSEGGPGSSESGSSEGGPGSSESGSSEGGPGSSESGSSEGGPGSGGEPSESGSSGESPGGSSGSESGESPGGSSGSESGSGGEPSESGSSGSEGSSGPGESSGSSESGSSEGGPGSGGEPSESGSSGSEGSSGPGESSGSSESGSSEGGPGSGGEPSESGSSGESPGGSSGSESGSGGEPSESGSSGSGGEPSESGSSGSSESGSSEGGPGSGGEPSESGSSGSGGEPSESGSSGSEGSSGPGESSGESPGGSSGSESGSEGSSGPGESSGSEGSSGPGESSGSGGEPSESGSSGSSESGSSEGGPGSSESGSSEGGPGESPGGSSGSESGSGGEPSESGSSGSEGSSGPGESSGESPGGSSGSESGSEGSSGPGSSESGSSEGGPGSGGEPSESGSSGSEGSSGPGESSGSEGSSGPGESSGSEGSSGPGESSGSGGEPSESGSSGSGGEPSESGSSGESPGGSSGSESGESPGGSSGSESGSGGEPSESGSSGSEGSSGPGESSGESPGGSSGSESGSSESGSSEGGPGSSESGSSEGGPGSSESGSSEGGPGSGGEPSESGSSGSSESGSSEGGPGESPGGSSGSESGSGGEPSESGSSGSSESGSSEGGPGESPGGSSGSESGSGGEPSESGSSGESPGGSSGSESGSGGEPSESGSS

SEQ ID NO: 956 - protein, 935 aa, Artificial Sequence
  Description of Artificial Sequence: Synthetic polypeptide
GPETLCGAELVDALQFVCGDRGFYFNKPTGYGSSSRRAPQTGIVDECCFRSCDLRRLEMYCAPLKPAKSAGGSPAGSPTSTEEGTSESATPESGPGTSTEPSEGSAPGSPAGSPTSTEEGTSTEPSEGSAPGTSTEPSEGSAPGTSESATPESGPGSEPATSGSETPGSEPATSGSETPGSPAGSPTSTEEGTSESATPESGPGTSTEPSEGSAPGTSTEPSEGSAPGSPAGSPTSTEEGTSTEPSEGSAPGTSTEPSEGSAPGTSESATPESGPGTSTEPSEGSAPGTSESATPESGPGSEPATSGSETPGTSTEPSEGSAPGTSTEPSEGSAPGTSESATPESGPGTSESATPESGPGSPAGSPTSTEEGTSESATPESGPGSEPATSGSETPGTSESATPESGPGTSTEPSEGSAPGTSTEPSEGSAPGTSTEPSEGSAPGTSTEPSEGSAPGTSTEPSEGSAPGTSTEPSEGSAPGSPAGSPTSTEEGTSTEPSEGSAPGTSESATPESGPGSEPATSGSETPGTSESATPESGPGSEPATSGSETPGTSESATPESGPGTSTEPSEGSAPGTSESATPESGPGSPAGSPTSTEEGSPAGSPTSTEEGSPAGSPTSTEEGTSESATPESGPGTSTEPSEGSAPGTSESATPESGPGSEPATSGSETPGTSESATPESGPGSEPATSGSETPGTSESATPESGPGTSTEPSEGSAPGSPAGSPTSTEEGTSESATPESGPGSEPATSGSETPGTSESATPESGPGSPAGSPTSTEEGSPAGSPTSTEEGTSTEPSEGSAPGTSESATPESGPGTSESATPESGPGTSESATPESGPGSEPATSGSETPGSEPATSGSETPGSPAGSPTSTEEGTSTEPSEGSAPGTSTEPSEGSAPGSEPATSGSETPGTSESATPESGPGTSTEPSEGSAP

SEQ ID NO: 957 - protein, 946 aa, Artificial Sequence
  Description of Artificial Sequence: Synthetic polypeptide
  MOD_RES (501)..(503): Any amino acid
  MOD_RES (514)..(517): Any amino acid
GPETLCGAELVDALQFVCGDRGFYFNKPTGYGSSSRRAPQTGIVDECCFRSCDLRRLEMYCAPLKPAKSAGGSTSESPSGTAPGTSPSGESSTAPGSTSESPSGTAPGSTSESPSGTAPGTSTPESGSASPGTSTPESGSASPGSTSESPSGTAPGSTSESPSGTAPGTSPSGESSTAPGSTSESPSGTAPGTSPSGESSTAPGTSPSGESSTAPGSTSSTAESPGPGTSPSGESSTAPGTSPSGESSTAPGSTSSTAESPGPGTSTPESGSASPGTSTPESGSASPGSTSESPSGTAPGSTSESPSGTAPGTSTPESGSASPGSTSSTAESPGPGTSTPESGSASPGSTSESPSGTAPGTSPSGESSTAPGSTSSTAESPGPGTSPSGESSTAPGTSTPESGSASPGSTSSTAESPGPGSTSSTAESPGPGSTSSTAESPGPGSTSSTAESPGPGTSPSGESSTAPGSTSESPSGTAPGSTSESPSGTAPGTSTPESGPXXXGASASGAPSTXXXXSESPSGTAPGSTSESPSGTAPGSTSESPSGTAPGSTSESPSGTAPGSTSESPSGTAPGSTSESPSGTAPGTSTPESGSASPGTSPSGESSTAPGTSPSGESSTAPGSTSSTAESPGPGTSPSGESSTAPGTSTPESGSASPGSTSESPSGTAPGSTSESPSGTAPGTSPSGESSTAPGSTSESPSGTAPGTSTPESGSASPGTSTPESGSASPGSTSESPSGTAPGTSTPESGSASPGSTSSTAESPGPGSTSESPSGTAPGSTSESPSGTAPGTSPSGESSTAPGSTSSTAESPGPGTSPSGESSTAPGTSTPESGSASPGTSPSGESSTAPGTSPSGESSTAPGTSPSGESSTAPGSTSSTAESPGPGSTSSTAESPGPGTSPSGESSTAPGSSPSASTGTGPGSSTPSGATGSPGSSTPSGATGSP

SEQ ID NO: 958 - protein, 935 aa, Artificial Sequence
  Description of Artificial Sequence: Synthetic polypeptide
GPETLCGAELVDALQFVCGDRGFYFNKPTGYGSSSRRAPQTGIVDECCFRSCDLRRLEMYCAPLKPAKSAGGASPGTSSTGSPGSSPSASTGTGPGSSPSASTGTGPGTPGSGTASSSPGSSTPSGATGSPGSNPSASTGTGPGASPGTSSTGSPGTPGSGTASSSPGSSTPSGATGSPGTPGSGTASSSPGASPGTSSTGSPGASPGTSSTGSPGTPGSGTASSSPGSSTPSGATGSPGASPGTSSTGSPGTPGSGTASSSPGSSTPSGATGSPGSNPSASTGTGPGSSPSASTGTGPGSSTPSGATGSPGSSTPSGATGSPGASPGTSSTGSPGASPGTSSTGSPGASPGTSSTGSPGTPGSGTASSSPGASPGTSSTGSPGASPGTSSTGSPGASPGTSSTGSPGSSPSASTGTGPGTPGSGTASSSPGASPGTSSTGSPGASPGTSSTGSPGASPGTSSTGSPGSSTPSGATGSPGSSTPSGATGSPGASPGTSSTGSPGTPGSGTASSSPGSSTPSGATGSPGSSTPSGATGSPGSSTPSGATGSPGSSPSASTGTGPGASPGTSSTGSPGASPGTSSTGSPGTPGSGTASSSPGASPGTSSTGSPGASPGTSSTGSPGASPGTSSTGSPGASPGTSSTGSPGTPGSGTASSSPGSSTPSGATGSPGTPGSGTASSSPGSSTPSGATGSPGTPGSGTASSSPGSSTPSGATGSPGSSTPSGATGSPGSSPSASTGTGPGSSPSASTGTGPGASPGTSSTGSPGTPGSGTASSSPGSSTPSGATGSPGSSPSASTGTGPGSSPSASTGTGPGASPGTSSTGSPGASPGTSSTGSPGSSTPSGATGSPGSSPSASTGTGPGASPGTSSTGSPGSSPSASTGTGPGTPGSGTASSSPGSSTPSGATGSPGSSTPSGATGSPGASPGTSSTGSP

SEQ ID NO: 959 - protein, 946 aa, Artificial Sequence
  Description of Artificial Sequence: Synthetic polypeptide
GPETLCGAELVDALQFVCGDRGFYFNKPTGYGSSSRRAPQTGIVDECCFRSCDLRRLEMYCAPLKPAKSAGGTSTEPSEGSAPGSEPATSGSETPGSPAGSPTSTEEGSTSSTAESPGPGTSTPESGSASPGSTSESPSGTAPGSTSESPSGTAPGTSTPESGSASPGTSTPESGSASPGSEPATSGSETPGTSESATPESGPGSPAGSPTSTEEGTSTEPSEGSAPGTSESATPESGPGTSTEPSEGSAPGTSTEPSEGSAPGSPAGSPTSTEEGTSTEPSEGSAPGTSTEPSEGSAPGTSESATPESGPGTSESATPESGPGTSTEPSEGSAPGTSTEPSEGSAPGTSESATPESGPGTSTEPSEGSAPGSEPATSGSETPGSPAGSPTSTEEGSSTPSGATGSPGTPGSGTASSSPGSSTPSGATGSPGTSTEPSEGSAPGTSTEPSEGSAPGSEPATSGSETPGSPAGSPTSTEEGSPAGSPTSTEEGTSTEPSEGSAPGASASGAPSTGGTSESATPESGPGSPAGSPTSTEEGSPAGSPTSTEEGSTSSTAESPGPGSTSESPSGTAPGTSPSGESSTAPGTPGSGTASSSPGSSTPSGATGSPGSSPSASTGTGPGSEPATSGSETPGTSESATPESGPGSEPATSGSETPGSTSSTAESPGPGSTSSTAESPGPGTSPSGESSTAPGSEPATSGSETPGSEPATSGSETPGTSTEPSEGSAPGSTSSTAESPGPGTSTPESGSASPGSTSESPSGTAPGTSTEPSEGSAPGTSTEPSEGSAPGTSTEPSEGSAPGSSTPSGATGSPGSSPSASTGTGPGASPGTSSTGSPGSEPATSGSETPGTSESATPESGPGSPAGSPTSTEEGSSTPSGATGSPGSSPSASTGTGPGASPGTSSTGSPGTSESATPESGPGTSTEPSEGSAPGTSTEPSEGSAP

SEQ ID NO: 960 - protein, 1389 aa, Artificial Sequence
  Description of Artificial Sequence: Synthetic polypeptide
GPETLCGAELVDALQFVCGDRGFYFNKPTGYGSSSRRAPQTGIVDECCFRSCDLRRLEMYCAPLKPAKSAGGTSTEPSEGSAPGSEPATSGSETPGSPAGSPTSTEEGSTSSTAESPGPGTSTPESGSASPGSTSESPSGTAPGSTSESPSGTAPGTSTPESGSASPGTSTPESGSASPGSEPATSGSETPGTSESATPESGPGSPAGSPTSTEEGTSTEPSEGSAPGTSESATPESGPGTSTEPSEGSAPGTSTEPSEGSAPGSPAGSPTSTEEGTSTEPSEGSAPGTSTEPSEGSAPGTSESATPESGPGTSESATPESGPGTSTEPSEGSAPGTSTEPSEGSAPGTSESATPESGPGTSTEPSEGSAPGSEPATSGSETPGSPAGSPTSTEEGSSTPSGATGSPGTPGSGTASSSPGSSTPSGATGSPGTSTEPSEGSAPGTSTEPSEGSAPGSEPATSGSETPGSPAGSPTSTEEGSPAGSPTSTEEGTSTEPSEGSAPGPEPTGPAPSGGSEPATSGSETPGTSESATPESGPGSPAGSPTSTEEGTSESATPESGPGSPAGSPTSTEEGSPAGSPTSTEEGTSESATPESGPGSPAGSPTSTEEGSPAGSPTSTEEGSTSSTAESPGPGSTSESPSGTAPGTSPSGESSTAPGSTSESPSGTAPGSTSESPSGTAPGTSPSGESSTAPGTSTEPSEGSAPGTSESATPESGPGTSESATPESGPGSEPATSGSETPGTSESATPESGPGTSESATPESGPGTSTEPSEGSAPGTSESATPESGPGTSTEPSEGSAPGTSPSGESSTAPGTSPSGESSTAPGTSPSGESSTAPGTSTEPSEGSAPGSPAGSPTSTEEGTSTEPSEGSAPGSSPSASTGTGPGSSTPSGATGSPGSSTPSGATGSPGSSTPSGATGSPGSSTPSGATGSPGASPGTSSTGSPGASASGAPSTGGTSPSGESSTAPGSTSSTAESPGPGTSPSGESSTAPGTSESATPESGPGTSTEPSEGSAPGTSTEPSEGSAPGSSPSASTGTGPGSSTPSGATGSPGASPGTSSTGSPGTSTPESGSASPGTSPSGESSTAPGTSPSGESSTAPGTSESATPESGPGSEPATSGSETPGTSTEPSEGSAPGSTSESPSGTAPGSTSESPSGTAPGTSTPESGSASPGSPAGSPTSTEEGTSESATPESGPGTSTEPSEGSAPGSPAGSPTSTEEGTSESATPESGPGSEPATSGSETPGSSTPSGATGSPGASPGTSSTGSPGSSTPSGATGSPGSTSESPSGTAPGTSPSGESSTAPGSTSSTAESPGPGSSTPSGATGSPGASPGTSSTGSPGTPGSGTASSSPGSPAGSPTSTEEGSPAGSPTSTEEGTSTEPSEGSAP

SEQ ID NO: 961 - protein, 984 aa, Artificial Sequence
  Description of Artificial Sequence: Synthetic polypeptide
MAEPAGSPTSTEEGTPGSGTASSSPGSSTPSGATGSPGASPGTSSTGSPGSPAGSPTSTEEGTSESATPESGPGTSTEPSEGSAPGSPAGSPTSTEEGTSTEPSEGSAPGTSTEPSEGSAPGTSESATPESGPGSEPATSGSETPGSEPATSGSETPGSPAGSPTSTEEGTSESATPESGPGTSTEPSEGSAPGTSTEPSEGSAPGSPAGSPTSTEEGTSTEPSEGSAPGTSTEPSEGSAPGTSESATPESGPGTSTEPSEGSAPGTSESATPESGPGSEPATSGSETPGTSTEPSEGSAPGTSTEPSEGSAPGTSESATPESGPGTSESATPESGPGSPAGSPTSTEEGTSESATPESGPGSEPATSGSETPGTSESATPESGPGTSTEPSEGSAPGTSTEPSEGSAPGTSTEPSEGSAPGTSTEPSEGSAPGTSTEPSEGSAPGTSTEPSEGSAPGSPAGSPTSTEEGTSTEPSEGSAPGTSESATPESGPGSEPATSGSETPGTSESATPESGPGSEPATSGSETPGTSESATPESGPGTSTEPSEGSAPGTSESATPESGPGSPAGSPTSTEEGSPAGSPTSTEEGSPAGSPTSTEEGTSESATPESGPGTSTEPSEGSAPGTSESATPESGPGSEPATSGSETPGTSESATPESGPGSEPATSGSETPGTSESATPESGPGTSTEPSEGSAPGSPAGSPTSTEEGTSESATPESGPGSEPATSGSETPGTSESATPESGPGSPAGSPTSTEEGSPAGSPTSTEEGTSTEPSEGSAPGTSESATPESGPGTSESATPESGPGTSESATPESGPGSEPATSGSETPGSEPATSGSETPGSPAGSPTSTEEGTSTEPSEGSAPGTSTEPSEGSAPGSEPATSGSETPGTSESATPESGPGTSTEPSEGSAPGGPETLCGAELVDALQFVCGDRGFYFNKPTGYGSSSRRAPQTGIVDECCFRSCDLRRLEMYCAPLKPAKSA

SEQ ID NO: 962 - protein, 995 aa, Artificial Sequence
  Description of Artificial Sequence: Synthetic polypeptide
MAEPAGSPTSTEEGASPGTSSTGSPGSSTPSGATGSPGSSTPSGATGSPGTSTEPSEGSAPGSEPATSGSETPGSPAGSPTSTEEGSTSSTAESPGPGTSTPESGSASPGSTSESPSGTAPGSTSESPSGTAPGTSTPESGSASPGTSTPESGSASPGSEPATSGSETPGTSESATPESGPGSPAGSPTSTEEGTSTEPSEGSAPGTSESATPESGPGTSTEPSEGSAPGTSTEPSEGSAPGSPAGSPTSTEEGTSTEPSEGSAPGTSTEPSEGSAPGTSESATPESGPGTSESATPESGPGTSTEPSEGSAPGTSTEPSEGSAPGTSESATPESGPGTSTEPSEGSAPGSEPATSGSETPGSPAGSPTSTEEGSSTPSGATGSPGTPGSGTASSSPGSSTPSGATGSPGTSTEPSEGSAPGTSTEPSEGSAPGSEPATSGSETPGSPAGSPTSTEEGSPAGSPTSTEEGTSTEPSEGSAPGASASGAPSTGGTSESATPESGPGSPAGSPTSTEEGSPAGSPTSTEEGSTSSTAESPGPGSTSESPSGTAPGTSPSGESSTAPGTPGSGTASSSPGSSTPSGATGSPGSSPSASTGTGPGSEPATSGSETPGTSESATPESGPGSEPATSGSETPGSTSSTAESPGPGSTSSTAESPGPGTSPSGESSTAPGSEPATSGSETPGSEPATSGSETPGTSTEPSEGSAPGSTSSTAESPGPGTSTPESGSASPGSTSESPSGTAPGTSTEPSEGSAPGTSTEPSEGSAPGTSTEPSEGSAPGSSTPSGATGSPGSSPSASTGTGPGASPGTSSTGSPGSEPATSGSETPGTSESATPESGPGSPAGSPTSTEEGSSTPSGATGSPGSSPSASTGTGPGASPGTSSTGSPGTSESATPESGPGTSTEPSEGSAPGTSTEPSEGSAPGGPETLCGAELVDALQFVCGDRGFYFNKPTGYGSSSRRAPQTGIVDECCFRSCDLRRLEMYCAPLKPAKSA

SEQ ID NO: 963 - protein, 215 aa, Artificial Sequence
  Description of Artificial Sequence: Synthetic polypeptide
GSEPATSGSETPGTSESATPESGPGSEPATSGSETPGSPAGSPTSTEEGTSTEPSEGSAPGSEPATSGSETPGSEPATSGSETPGSEPATSGSETPGTSTEPSEGSAPGTSESATPESGPGSEPATSGSETPGTSTEPSEGSAPGGPETLCGAELVDALQFVCGDRGFYFNKPTGYGSSSRRAPQTGIVDECCFRSCDLRRLEMYCAPLKPAKSA

SEQ ID NO: 964 - protein, 215 aa, Artificial Sequence
  Description of Artificial Sequence: Synthetic polypeptide
GTSTPESGSASPGTSPSGESSTAPGTSPSGESSTAPGSTSSTAESPGPGSTSESPSGTAPGSTSSTAESPGPGTSPSGESSTAPGTSTPESGSASPGSTSSTAESPGPGTSPSGESSTAPGTSPSGESSTAPGTSPSGESSTAPGGPETLCGAELVDALQFVCGDRGFYFNKPTGYGSSSRRAPQTGIVDECCFRSCDLRRLEMYCAPLKPAKSA

SEQ ID NO: 965 - protein, 359 aa, Artificial Sequence
  Description of Artificial Sequence: Synthetic polypeptide
GTSESATPESGPGSEPATSGSETPGTSESATPESGPGSEPATSGSETPGTSESATPESGPGTSTEPSEGSAPGSPAGSPTSTEEGTSESATPESGPGSEPATSGSETPGTSESATPESGPGSPAGSPTSTEEGSPAGSPTSTEEGTSTEPSEGSAPGTSESATPESGPGTSESATPESGPGTSESATPESGPGSEPATSGSETPGSEPATSGSETPGSPAGSPTSTEEGTSTEPSEGSAPGTSTEPSEGSAPGSEPATSGSETPGTSESATPESGPGTSTEPSEGSAPGGPETLCGAELVDALQFVCGDRGFYFNKPTGYGSSSRRAPQTGIVDECCFRSCDLRRLEMYCAPLKPAKSA

SEQ ID NO: 966 - protein, 647 aa, Artificial Sequence
  Description of Artificial Sequence: Synthetic polypeptide
GSPAGSPTSTEEGTSESATPESGPGTSTEPSEGSAPGSPAGSPTSTEEGTSTEPSEGSAPGTSTEPSEGSAPGTSESATPESGPGSEPATSGSETPGSEPATSGSETPGSPAGSPTSTEEGTSESATPESGPGTSTEPSEGSAPGTSTEPSEGSAPGSPAGSPTSTEEGTSTEPSEGSAPGTSTEPSEGSAPGTSESATPESGPGTSTEPSEGSAPGTSESATPESGPGSEPATSGSETPGTSTEPSEGSAPGTSTEPSEGSAPGTSESATPESGPGTSESATPESGPGSPAGSPTSTEEGTSESATPESGPGSEPATSGSETPGTSESATPESGPGTSTEPSEGSAPGTSTEPSEGSAPGTSTEPSEGSAPGTSTEPSEGSAPGTSTEPSEGSAPGTSTEPSEGSAPGSPAGSPTSTEEGTSTEPSEGSAPGTSESATPESGPGSEPATSGSETPGTSESATPESGPGSEPATSGSETPGTSESATPESGPGTSTEPSEGSAPGTSESATPESGPGSPAGSPTSTEEGSPAGSPTSTEEGSPAGSPTSTEEGTSESATPESGPGTSTEPSEGSAPGGPETLCGAELVDALQFVCGDRGFYFNKPTGYGSSSRRAPQTGIVDECCFRSCDLRRLEMYCAPLKPAKSA

SEQ ID NO: 967 - protein, 647 aa, Artificial Sequence
  Description of Artificial Sequence: Synthetic polypeptide
GSTSSTAESPGPGSTSSTAESPGPGSTSESPSGTAPGSTSSTAESPGPGSTSSTAESPGPGTSTPESGSASPGSTSESPSGTAPGTSPSGESSTAPGSTSESPSGTAPGSTSESPSGTAPGTSPSGESSTAPGSTSESPSGTAPGSTSESPSGTAPGTSPSGESSTAPGSTSESPSGTAPGSTSESPSGTAPGSTSESPSGTAPGTSTPESGSASPGSTSESPSGTAPGTSTPESGSASPGSTSSTAESPGPGSTSSTAESPGPGTSTPESGSASPGTSTPESGSASPGSTSESPSGTAPGTSTPESGSASPGTSTPESGSASPGSTSESPSGTAPGSTSESPSGTAPGSTSESPSGTAPGSTSSTAESPGPGTSTPESGSASPGTSTPESGSASPGSTSESPSGTAPGSTSESPSGTAPGTSTPESGSASPGSTSESPSGTAPGSTSESPSGTAPGTSTPESGSASPGTSPSGESSTAPGSTSSTAESPGPGTSPSGESSTAPGSTSSTAESPGPGTSTPESGSASPGSTSESPSGTAPGSTSSTAESPGPGTSTPESGSASPGTSTPESGSASPGGPETLCGAELVDALQFVCGDRGFYFNKPTGYGSSSRRAPQTGIVDECCFRSCDLRRLEMYCAPLKPAKSA

SEQ ID NO: 968 - protein, 907 aa, Artificial Sequence
  Description of Artificial Sequence: Synthetic polypeptide
GSSESGSSEGGPGSSESGSSEGGPGESPGGSSGSESGSGGEPSESGSSGESPGGSSGSESGESPGGSSGSESGSSESGSSEGGPGSSESGSSEGGPGSSESGSSEGGPGESPGGSSGSESGESPGGSSGSESGESPGGSSGSESGSSESGSSEGGPGSSESGSSEGGPGSSESGSSEGGPGSSESGSSEGGPGSSESGSSEGGPGSSESGSSEGGPGSGGEPSESGSSGESPGGSSGSESGESPGGSSGSESGSGGEPSESGSSGSEGSSGPGESSGSSESGSSEGGPGSGGEPSESGSSGSEGSSGPGESSGSSESGSSEGGPGSGGEPSESGSSGESPGGSSGSESGSGGEPSESGSSGSGGEPSESGSSGSSESGSSEGGPGSGGEPSESGSSGSGGEPSESGSSGSEGSSGPGESSGESPGGSSGSESGSEGSSGPGESSGSEGSSGPGESSGSGGEPSESGSSGSSESGSSEGGPGSSESGSSEGGPGESPGGSSGSESGSGGEPSESGSSGSEGSSGPGESSGESPGGSSGSESGSEGSSGPGSSESGSSEGGPGSGGEPSESGSSGSEGSSGPGESSGSEGSSGPGESSGSEGSSGPGESSGSGGEPSESGSSGSGGEPSESGSSGESPGGSSGSESGESPGGSSGSESGSGGEPSESGSSGSEGSSGPGESSGESPGGSSGSESGSSESGSSEGGPGSSESGSSEGGPGSSESGSSEGGPGSGGEPSESGSSGSSESGSSEGGPGESPGGSSGSESGSGGEPSESGSSGSSESGSSEGGPGESPGGSSGSESGSGGEPSESGSSGESPGGSSGSESGSGGEPSESGSSGGPETLCGAELVDALQFVCGDRGFYFNKPTGYGSSSRRAPQTGIVDECCFRSCDLRRLEMYCAPLKPAKSA

SEQ ID NO: 969 - protein, 935 aa, Artificial Sequence
  Description of Artificial Sequence: Synthetic polypeptide
GSPAGSPTSTEEGTSESATPESGPGTSTEPSEGSAPGSPAGSPTSTEEGTSTEPSEGSAPGTSTEPSEGSAPGTSESATPESGPGSEPATSGSETPGSEPATSGSETPGSPAGSPTSTEEGTSESATPESGPGTSTEPSEGSAPGTSTEPSEGSAPGSPAGSPTSTEEGTSTEPSEGSAPGTSTEPSEGSAPGTSESATPESGPGTSTEPSEGSAPGTSESATPESGPGSEPATSGSETPGTSTEPSEGSAPGTSTEPSEGSAPGTSESATPESGPGTSESATPESGPGSPAGSPTSTEEGTSESATPESGPGSEPATSGSETPGTSESATPESGPGTSTEPSEGSAPGTSTEPSEGSAPGTSTEPSEGSAPGTSTEPSEGSAPGTSTEPSEGSAPGTSTEPSEGSAPGSPAGSPTSTEEGTSTEPSEGSAPGTSESATPESGPGSEPATSGSETPGTSESATPESGPGSEPATSGSETPGTSESATPESGPGTSTEPSEGSAPGTSESATPESGPGSPAGSPTSTEEGSPAGSPTSTEEGSPAGSPTSTEEGTSESATPESGPGTSTEPSEGSAPGTSESATPESGPGSEPATSGSETPGTSESATPESGPGSEPATSGSETPGTSESATPESGPGTSTEPSEGSAPGSPAGSPTSTEEGTSESATPESGPGSEPATSGSETPGTSESATPESGPGSPAGSPTSTEEGSPAGSPTSTEEGTSTEPSEGSAPGTSESATPESGPGTSESATPESGPGTSESATPESGPGSEPATSGSETPGSEPATSGSETPGSPAGSPTSTEEGTSTEPSEGSAPGTSTEPSEGSAPGSEPATSGSETPGTSESATPESGPGTSTEPSEGSAPGGPETLCGAELVDALQFVCGDRGFYFNKPTGYGSSSRRAPQTGIVDECCFRSCDLRRLEMYCAPLKPAKSA

SEQ ID NO: 970 - protein, 946 aa, Artificial Sequence
  Description of Artificial Sequence: Synthetic polypeptide
  MOD_RES (430)..(432): Any amino acid
  MOD_RES (443)..(446): Any amino acid
GSTSESPSGTAPGTSPSGESSTAPGSTSESPSGTAPGSTSESPSGTAPGTSTPESGSASPGTSTPESGSASPGSTSESPSGTAPGSTSESPSGTAPGTSPSGESSTAPGSTSESPSGTAPGTSPSGESSTAPGTSPSGESSTAPGSTSSTAESPGPGTSPSGESSTAPGTSPSGESSTAPGSTSSTAESPGPGTSTPESGSASPGTSTPESGSASPGSTSESPSGTAPGSTSESPSGTAPGTSTPESGSASPGSTSSTAESPGPGTSTPESGSASPGSTSESPSGTAPGTSPSGESSTAPGSTSSTAESPGPGTSPSGESSTAPGTSTPESGSASPGSTSSTAESPGPGSTSSTAESPGPGSTSSTAESPGPGSTSSTAESPGPGTSPSGESSTAPGSTSESPSGTAPGSTSESPSGTAPGTSTPESGPXXXGASASGAPSTXXXXSESPSGTAPGSTSESPSGTAPGSTSESPSGTAPGSTSESPSGTAPGSTSESPSGTAPGSTSESPSGTAPGTSTPESGSASPGTSPSGESSTAPGTSPSGESSTAPGSTSSTAESPGPGTSPSGESSTAPGTSTPESGSASPGSTSESPSGTAPGSTSESPSGTAPGTSPSGESSTAPGSTSESPSGTAPGTSTPESGSASPGTSTPESGSASPGSTSESPSGTAPGTSTPESGSASPGSTSSTAESPGPGSTSESPSGTAPGSTSESPSGTAPGTSPSGESSTAPGSTSSTAESPGPGTSPSGESSTAPGTSTPESGSASPGTSPSGESSTAPGTSPSGESSTAPGTSPSGESSTAPGSTSSTAESPGPGSTSSTAESPGPGTSPSGESSTAPGSSPSASTGTGPGSSTPSGATGSPGSSTPSGATGSPGGPETLCGAELVDALQFVCGDRGFYFNKPTGYGSSSRRAPQTGIVDECCFRSCDLRRLEMYCAPLKPAKSA

SEQ ID NO: 971 - protein, 935 aa, Artificial Sequence
  Description of Artificial Sequence: Synthetic polypeptide
GASPGTSSTGSPGSSPSASTGTGPGSSPSASTGTGPGTPGSGTASSSPGSSTPSGATGSPGSNPSASTGTGPGASPGTSSTGSPGTPGSGTASSSPGSSTPSGATGSPGTPGSGTASSSPGASPGTSSTGSPGASPGTSSTGSPGTPGSGTASSSPGSSTPSGATGSPGASPGTSSTGSPGTPGSGTASSSPGSSTPSGATGSPGSNPSASTGTGPGSSPSASTGTGPGSSTPSGATGSPGSSTPSGATGSPGASPGTSSTGSPGASPGTSSTGSPGASPGTSSTGSPGTPGSGTASSSPGASPGTSSTGSPGASPGTSSTGSPGASPGTSSTGSPGSSPSASTGTGPGTPGSGTASSSPGASPGTSSTGSPGASPGTSSTGSPGASPGTSSTGSPGSSTPSGATGSPGSSTPSGATGSPGASPGTSSTGSPGTPGSGTASSSPGSSTPSGATGSPGSSTPSGATGSPGSSTPSGATGSPGSSPSASTGTGPGASPGTSSTGSPGASPGTSSTGSPGTPGSGTASSSPGASPGTSSTGSPGASPGTSSTGSPGASPGTSSTGSPGASPGTSSTGSPGTPGSGTASSSPGSSTPSGATGSPGTPGSGTASSSPGSSTPSGATGSPGTPGSGTASSSPGSSTPSGATGSPGSSTPSGATGSPGSSPSASTGTGPGSSPSASTGTGPGASPGTSSTGSPGTPGSGTASSSPGSSTPSGATGSPGSSPSASTGTGPGSSPSASTGTGPGASPGTSSTGSPGASPGTSSTGSPGSSTPSGATGSPGSSPSASTGTGPGASPGTSSTGSPGSSPSASTGTGPGTPGSGTASSSPGSSTPSGATGSPGSSTPSGATGSPGASPGTSSTGSPGGPETLCGAELVDALQFVCGDRGFYFNKPTGYGSSSRRAPQTGIVDECCFRSCDLRRLEMYCAPLKPAKSA

SEQ ID NO: 972 - protein, 946 aa, Artificial Sequence
  Description of Artificial Sequence: Synthetic polypeptide
GTSTEPSEGSAPGSEPATSGSETPGSPAGSPTSTEEGSTSSTAESPGPGTSTPESGSASPGSTSESPSGTAPGSTSESPSGTAPGTSTPESGSASPGTSTPESGSASPGSEPATSGSETPGTSESATPESGPGSPAGSPTSTEEGTSTEPSEGSAPGTSESATPESGPGTSTEPSEGSAPGTSTEPSEGSAPGSPAGSPTSTEEGTSTEPSEGSAPGTSTEPSEGSAPGTSESATPESGPGTSESATPESGPGTSTEPSEGSAPGTSTEPSEGSAPGTSESATPESGPGTSTEPSEGSAPGSEPATSGSETPGSPAGSPTSTEEGSSTPSGATGSPGTPGSGTASSSPGSSTPSGATGSPGTSTEPSEGSAPGTSTEPSEGSAPGSEPATSGSETPGSPAGSPTSTEEGSPAGSPTSTEEGTSTEPSEGSAPGASASGAPSTGGTSESATPESGPGSPAGSPTSTEEGSPAGSPTSTEEGSTSSTAESPGPGSTSESPSGTAPGTSPSGESSTAPGTPGSGTASSSPGSSTPSGATGSPGSSPSASTGTGPGSEPATSGSETPGTSESATPESGPGSEPATSGSETPGSTSSTAESPGPGSTSSTAESPGPGTSPSGESSTAPGSEPATSGSETPGSEPATSGSETPGTSTEPSEGSAPGSTSSTAESPGPGTSTPESGSASPGSTSESPSGTAPGTSTEPSEGSAPGTSTEPSEGSAPGTSTEPSEGSAPGSSTPSGATGSPGSSPSASTGTGPGASPGTSSTGSPGSEPATSGSETPGTSESATPESGPGSPAGSPTSTEEGSSTPSGATGSPGSSPSASTGTGPGASPGTSSTGSPGTSESATPESGPGTSTEPSEGSAPGTSTEPSEGSAPGGPETLCGAELVDALQFVCGDRGFYFNKPTGYGSSSRRAPQTGIVDECCFRSCDLRRLEMYCAPLKPAKSA

SEQ ID NO: 973 - protein, 1389 aa, Artificial Sequence
  Description of Artificial Sequence: Synthetic polypeptide
GTSTEPSEGSAPGSEPATSGSETPGSPAGSPTSTEEGSTSSTAESPGPGTSTPESGSASPGSTSESPSGTAPGSTSESPSGTAPGTSTPESGSASPGTSTPESGSASPGSEPATSGSETPGTSESATPESGPGSPAGSPTSTEEGTSTEPSEGSAPGTSESATPESGPGTSTEPSEGSAPGTSTEPSEGSAPGSPAGSPTSTEEGTSTEPSEGSAPGTSTEPSEGSAPGTSESATPESGPGTSESATPESGPGTSTEPSEGSAPGTSTEPSEGSAPGTSESATPESGPGTSTEPSEGSAPGSEPATSGSETPGSPAGSPTSTEEGSSTPSGATGSPGTPGSGTASSSPGSSTPSGATGSPGTSTEPSEGSAPGTSTEPSEGSAPGSEPATSGSETPGSPAGSPTSTEEGSPAGSPTSTEEGTSTEPSEGSAPGPEPTGPAPSGGSEPATSGSETPGTSESATPESGPGSPAGSPTSTEEGTSESATPESGPGSPAGSPTSTEEGSPAGSPTSTEEGTSESATPESGPGSPAGSPTSTEEGSPAGSPTSTEEGSTSSTAESPGPGSTSESPSGTAPGTSPSGESSTAPGSTSESPSGTAPGSTSESPSGTAPGTSPSGESSTAPGTSTEPSEGSAPGTSESATPESGPGTSESATPESGPGSEPATSGSETPGTSESATPESGPGTSESATPESGPGTSTEPSEGSAPGTSESATPESGPGTSTEPSEGSAPGTSPSGESSTAPGTSPSGESSTAPGTSPSGESSTAPGTSTEPSEGSAPGSPAGSPTSTEEGTSTEPSEGSAPGSSPSASTGTGPGSSTPSGATGSPGSSTPSGATGSPGSSTPSGATGSPGSSTPSGATGSPGASPGTSSTGSPGASASGAPSTGGTSPSGESSTAPGSTSSTAESPGPGTSPSGESSTAPGTSESATPESGPGTSTEPSEGSAPGTSTEPSEGSAPGSSPSASTGTGPGSSTPSGATGSPGASPGTSSTGSPGTSTPESGSASPGTSPSGESSTAPGTSPSGESSTAPGTSESATPESGPGSEPATSGSETPGTSTEPSEGSAPGSTSESPSGTAPGSTSESPSGTAPGTSTPESGSASPGSPAGSPTSTEEGTSESATPESGPGTSTEPSEGSAPGSPAGSPTSTEEGTSESATPESGPGSEPATSGSETPGSSTPSGATGSPGASPGTSSTGSPGSSTPSGATGSPGSTSESPSGTAPGTSPSGESSTAPGSTSSTAESPGPGSSTPSGATGSPGASPGTSSTGSPGTPGSGTASSSPGSPAGSPTSTEEGSPAGSPTSTEEGTSTEPSEGSAPGGPETLCGAELVDALQFVCGDRGFYFNKPTGYGSSSRRAPQTGIVDECCFRSCDLRRLEMYCAPLKPAKSA

SEQ ID NO: 974 - protein, 212 aa, Artificial Sequence
  Description of Artificial Sequence: Synthetic polypeptide
AYRPSETLCGGELVDTLQFVCGDRGFYFSRPASRVSRRSRGIVEECCFRSCDLALLETYCATPAKSEGGSEPATSGSETPGTSESATPESGPGSEPATSGSETPGSPAGSPTSTEEGTSTEPSEGSAPGSEPATSGSETPGSEPATSGSETPGSEPATSGSETPGTSTEPSEGSAPGTSESATPESGPGSEPATSGSETPGTSTEPSEGSAP

SEQ ID NO: 975 - protein, 212 aa, Artificial Sequence
  Description of Artificial Sequence: Synthetic polypeptide
AYRPSETLCGGELVDTLQFVCGDRGFYFSRPASRVSRRSRGIVEECCFRSCDLALLETYCATPAKSEGGTSTPESGSASPGTSPSGESSTAPGTSPSGESSTAPGSTSSTAESPGPGSTSESPSGTAPGSTSSTAESPGPGTSPSGESSTAPGTSTPESGSASPGSTSSTAESPGPGTSPSGESSTAPGTSPSGESSTAPGTSPSGESSTAP

SEQ ID NO: 976 - protein, 356 aa, Artificial Sequence
  Description of Artificial Sequence: Synthetic polypeptide
AYRPSETLCGGELVDTLQFVCGDRGFYFSRPASRVSRRSRGIVEECCFRSCDLALLETYCATPAKSEGGTSESATPESGPGSEPATSGSETPGTSESATPESGPGSEPATSGSETPGTSESATPESGPGTSTEPSEGSAPGSPAGSPTSTEEGTSESATPESGPGSEPATSGSETPGTSESATPESGPGSPAGSPTSTEEGSPAGSPTSTEEGTSTEPSEGSAPGTSESATPESGPGTSESATPESGPGTSESATPESGPGSEPATSGSETPGSEPATSGSETPGSPAGSPTSTEEGTSTEPSEGSAPGTSTEPSEGSAPGSEPATSGSETPGTSESATPESGPGTSTEPSEGSAP

SEQ ID NO: 977 - protein, 644 aa, Artificial Sequence
  Description of Artificial Sequence: Synthetic polypeptide
AYRPSETLCGGELVDTLQFVCGDRGFYFSRPASRVSRRSRGIVEECCFRSCDLALLETYCATPAKSEGGSPAGSPTSTEEGTSESATPESGPGTSTEPSEGSAPGSPAGSPTSTEEGTSTEPSEGSAPGTSTEPSEGSAPGTSESATPESGPGSEPATSGSETPGSEPATSGSETPGSPAGSPTSTEEGTSESATPESGPGTSTEPSEGSAPGTSTEPSEGSAPGSPAGSPTSTEEGTSTEPSEGSAPGTSTEPSEGSAPGTSESATPESGPGTSTEPSEGSAPGTSESATPESGPGSEPATSGSETPGTSTEPSEGSAPGTSTEPSEGSAPGTSESATPESGPGTSESATPESGPGSPAGSPTSTEEGTSESATPESGPGSEPATSGSETPGTSESATPESGPGTSTEPSEGSAPGTSTEPSEGSAPGTSTEPSEGSAPGTSTEPSEGSAPGTSTEPSEGSAPGTSTEPSEGSAPGSPAGSPTSTEEGTSTEPSEGSAPGTSESATPESGPGSEPATSGSETPGTSESATPESGPGSEPATSGSETPGTSESATPESGPGTSTEPSEGSAPGTSESATPESGPGSPAGSPTSTEEGSPAGSPTSTEEGSPAGSPTSTEEGTSESATPESGPGTSTEPSEGSAP

SEQ ID NO: 978 - protein, 644 aa, Artificial Sequence
  Description of Artificial Sequence: Synthetic polypeptide
AYRPSETLCGGELVDTLQFVCGDRGFYFSRPASRVSRRSRGIVEECCFRSCDLALLETYCATPAKSEGGSTSSTAESPGPGSTSSTAESPGPGSTSESPSGTAPGSTSSTAESPGPGSTSSTAESPGPGTSTPESGSASPGSTSESPSGTAPGTSPSGESSTAPGSTSESPSGTAPGSTSESPSGTAPGTSPSGESSTAPGSTSESPSGTAPGSTSESPSGTAPGTSPSGESSTAPGSTSESPSGTAPGSTSESPSGTAPGSTSESPSGTAPGTSTPESGSASPGSTSESPSGTAPGTSTPESGSASPGSTSSTAESPGPGSTSSTAESPGPGTSTPESGSASPGTSTPESGSASPGSTSESPSGTAPGTSTPESGSASPGTSTPESGSASPGSTSESPSGTAPGSTSESPSGTAPGSTSESPSGTAPGSTSSTAESPGPGTSTPESGSASPGTSTPESGSASPGSTSESPSGTAPGSTSESPSGTAPGTSTPESGSASPGSTSESPSGTAPGSTSESPSGTAPGTSTPESGSASPGTSPSGESSTAPGSTSSTAESPGPGTSPSGESSTAPGSTSSTAESPGPGTSTPESGSASPGSTSESPSGTAPGSTSSTAESPGPGTSTPESGSASPGTSTPESGSASP

SEQ ID NO: 979 - protein, 904 aa, Artificial Sequence
  Description of Artificial Sequence: Synthetic polypeptide
AYRPSETLCGGELVDTLQFVCGDRGFYFSRPASRVSRRSRGIVEECCFRSCDLALLETYCATPAKSEGGSSESGSSEGGPGSSESGSSEGGPGESPGGSSGSESGSGGEPSESGSSGESPGGSSGSESGESPGGSSGSESGSSESGSSEGGPGSSESGSSEGGPGSSESGSSEGGPGESPGGSSGSESGESPGGSSGSESGESPGGSSGSESGSSESGSSEGGPGSSESGSSEGGPGSSESGSSEGGPGSSESGSSEGGPGSSESGSSEGGPGSSESGSSEGGPGSGGEPSESGSSGESPGGSSGSESGESPGGSSGSESGSGGEPSESGSSGSEGSSGPGESSGSSESGSSEGGPGSGGEPSESGSSGSEGSSGPGESSGSSESGSSEGGPGSGGEPSESGSSGESPGGSSGSESGSGGEPSESGSSGSGGEPSESGSSGSSESGSSEGGPGSGGEPSESGSSGSGGEPSESGSSGSEGSSGPGESSGESPGGSSGSESGSEGSSGPGESSGSEGSSGPGESSGSGGEPSESGSSGSSESGSSEGGPGSSESGSSEGGPGESPGGSSGSESGSGGEPSESGSSGSEGSSGPGESSGESPGGSSGSESGSEGSSGPGSSESGSSEGGPGSGGEPSESGSSGSEGSSGPGESSGSEGSSGPGESSGSEGSSGPGESSGSGGEPSESGSSGSGGEPSESGSSGESPGGSSGSESGESPGGSSGSESGSGGEPSESGSSGSEGSSGPGESSGESPGGSSGSESGSSESGSSEGGPGSSESGSSEGGPGSSESGSSEGGPGSGGEPSESGSSGSSESGSSEGGPGESPGGSSGSESGSGGEPSESGSSGSSESGSSEGGPGESPGGSSGSESGSGGEPSESGSSGESPGGSSGSESGSGGEPSESGSS

SEQ ID NO: 980 - protein, 932 aa, Artificial Sequence
  Description of Artificial Sequence: Synthetic polypeptide
AYRPSETLCGGELVDTLQFVCGDRGFYFSRPASRVSRRSRGIVEECCFRSCDLALLETYCATPAKSEGGSPAGSPTSTEEGTSESATPESGPGTSTEPSEGSAPGSPAGSPTSTEEGTSTEPSEGSAPGTSTEPSEGSAPGTSESATPESGPGSEPATSGSETPGSEPATSGSETPGSPAGSPTSTEEGTSESATPESGPGTSTEPSEGSAPGTSTEPSEGSAPGSPAGSPTSTEEGTSTEPSEGSAPGTSTEPSEGSAPGTSESATPESGPGTSTEPSEGSAPGTSESATPESGPGSEPATSGSETPGTSTEPSEGSAPGTSTEPSEGSAPGTSESATPESGPGTSESATPESGPGSPAGSPTSTEEGTSESATPESGPGSEPATSGSETPGTSESATPESGPGTSTEPSEGSAPGTSTEPSEGSAPGTSTEPSEGSAPGTSTEPSEGSAPGTSTEPSEGSAPGTSTEPSEGSAPGSPAGSPTSTEEGTSTEPSEGSAPGTSESATPESGPGSEPATSGSETPGTSESATPESGPGSEPATSGSETPGTSESATPESGPGTSTEPSEGSAPGTSESATPESGPGSPAGSPTSTEEGSPAGSPTSTEEGSPAGSPTSTEEGTSESATPESGPGTSTEPSEGSAPGTSESATPESGPGSEPATSGSETPGTSESATPESGPGSEPATSGSETPGTSESATPESGPGTSTEPSEGSAPGSPAGSPTSTEEGTSESATPESGPGSEPATSGSETPGTSESATPESGPGSPAGSPTSTEEGSPAGSPTSTEEGTSTEPSEGSAPGTSESATPESGPGTSESATPESGPGTSESATPESGPGSEPATSGSETPGSEPATSGSETPGSPAGSPTSTEEGTSTEPSEGSAPGTSTEPSEGSAPGSEPATSGSETPGTSESATPESGPGTSTEPSEGSAP

SEQ ID NO: 981 - protein, 943 aa, Artificial Sequence
  Description of Artificial Sequence: Synthetic polypeptide
  MOD_RES (498)..(500): Any amino acid
  MOD_RES (511)..(514): Any amino acid
AYRPSETLCGGELVDTLQFVCGDRGFYFSRPASRVSRRSRGIVEECCFRSCDLALLETYCATPAKSEGGSTSESPSGTAPGTSPSGESSTAPGSTSESPSGTAPGSTSESPSGTAPGTSTPESGSASPGTSTPESGSASPGSTSESPSGTAPGSTSESPSGTAPGTSPSGESSTAPGSTSESPSGTAPGTSPSGESSTAPGTSPSGESSTAPGSTSSTAESPGPGTSPSGESSTAPGTSPSGESSTAPGSTSSTAESPGPGTSTPESGSASPGTSTPESGSASPGSTSESPSGTAPGSTSESPSGTAPGTSTPESGSASPGSTSSTAESPGPGTSTPESGSASPGSTSESPSGTAPGTSPSGESSTAPGSTSSTAESPGPGTSPSGESSTAPGTSTPESGSASPGSTSSTAESPGPGSTSSTAESPGPGSTSSTAESPGPGSTSSTAESPGPGTSPSGESSTAPGSTSESPSGTAPGSTSESPSGTAPGTSTPESGPXXXGASASGAPSTXXXXSESPSGTAPGSTSESPSGTAPGSTSESPSGTAPGSTSESPSGTAPGSTSESPSGTAPGSTSESPSGTAPGTSTPESGSASPGTSPSGESSTAPGTSPSGESSTAPGSTSSTAESPGPGTSPSGESSTAPGTSTPESGSASPGSTSESPSGTAPGSTSESPSGTAPGTSPSGESSTAPGSTSESPSGTAPGTSTPESGSASPGTSTPESGSASPGSTSESPSGTAPGTSTPESGSASPGSTSSTAESPGPGSTSESPSGTAPGSTSESPSGTAPGTSPSGESSTAPGSTSSTAESPGPGTSPSGESSTAPGTSTPESGSASPGTSPSGESSTAPGTSPSGESSTAPGTSPSGESSTAPGSTSSTAESPGPGSTSSTAESPGPGTSPSGESSTAPGSSPSASTGTGPGSSTPSGATGSPGSSTPSGATGSP

SEQ ID NO: 982 - protein, 932 aa, Artificial Sequence
  Description of Artificial Sequence: Synthetic polypeptide
AYRPSETLCGGELVDTLQFVCGDRGFYFSRPASRVSRRSRGIVEECCFRSCDLALLETYCATPAKSEGGASPGTSSTGSPGSSPSASTGTGPGSSPSASTGTGPGTPGSGTASSSPGSSTPSGATGSPGSNPSASTGTGPGASPGTSSTGSPGTPGSGTASSSPGSSTPSGATGSPGTPGSGTASSSPGASPGTSSTGSPGASPGTSSTGSPGTPGSGTASSSPGSSTPSGATGSPGASPGTSSTGSPGTPGSGTASSSPGSSTPSGATGSPGSNPSASTGTGPGSSPSASTGTGPGSSTPSGATGSPGSSTPSGATGSPGASPGTSSTGSPGASPGTSSTGSPGASPGTSSTGSPGTPGSGTASSSPGASPGTSSTGSPGASPGTSSTGSPGASPGTSSTGSPGSSPSASTGTGPGTPGSGTASSSPGASPGTSSTGSPGASPGTSSTGSPGASPGTSSTGSPGSSTPSGATGSPGSSTPSGATGSPGASPGTSSTGSPGTPGSGTASSSPGSSTPSGATGSPGSSTPSGATGSPGSSTPSGATGSPGSSPSASTGTGPGASPGTSSTGSPGASPGTSSTGSPGTPGSGTASSSPGASPGTSSTGSPGASPGTSSTGSPGASPGTSSTGSPGASPGTSSTGSPGTPGSGTASSSPGSSTPSGATGSPGTPGSGTASSSPGSSTPSGATGSPGTPGSGTASSSPGSSTPSGATGSPGSSTPSGATGSPGSSPSASTGTGPGSSPSASTGTGPGASPGTSSTGSPGTPGSGTASSSPGSSTPSGATGSPGSSPSASTGTGPGSSPSASTGTGPGASPGTSSTGSPGASPGTSSTGSPGSSTPSGATGSPGSSPSASTGTGPGASPGTSSTGSPGSSPSASTGTGPGTPGSGTASSSPGSSTPSGATGSPGSSTPSGATGSPGASPGTSSTGSP

SEQ ID NO: 983 - protein, 943 aa, Artificial Sequence
  Description of Artificial Sequence: Synthetic polypeptide
AYRPSETLCGGELVDTLQFVCGDRGFYFSRPASRVSRRSRGIVEECCFRSCDLALLETYCATPAKSEGGTSTEPSEGSAPGSEPATSGSETPGSPAGSPTSTEEGSTSSTAESPGPGTSTPESGSASPGSTSESPSGTAPGSTSESPSGTAPGTSTPESGSASPGTSTPESGSASPGSEPATSGSETPGTSESATPESGPGSPAGSPTSTEEGTSTEPSEGSAPGTSESATPESGPGTSTEPSEGSAPGTSTEPSEGSAPGSPAGSPTSTEEGTSTEPSEGSAPGTSTEPSEGSAPGTSESATPESGPGTSESATPESGPGTSTEPSEGSAPGTSTEPSEGSAPGTSESATPESGPGTSTEPSEGSAPGSEPATSGSETPGSPAGSPTSTEEGSSTPSGATGSPGTPGSGTASSSPGSSTPSGATGSPGTSTEPSEGSAPGTSTEPSEGSAPGSEPATSGSETPGSPAGSPTSTEEGSPAGSPTSTEEGTSTEPSEGSAPGASASGAPSTGGTSESATPESGPGSPAGSPTSTEEGSPAGSPTSTEEGSTSSTAESPGPGSTSESPSGTAPGTSPSGESSTAPGTPGSGTASSSPGSSTPSGATGSPGSSPSASTGTGPGSEPATSGSETPGTSESATPESGPGSEPATSGSETPGSTSSTAESPGPGSTSSTAESPGPGTSPSGESSTAPGSEPATSGSETPGSEPATSGSETPGTSTEPSEGSAPGSTSSTAESPGPGTSTPESGSASPGSTSESPSGTAPGTSTEPSEGSAPGTSTEPSEGSAPGTSTEPSEGSAPGSSTPSGATGSPGSSPSASTGTGPGASPGTSSTGSPGSEPATSGSETPGTSESATPESGPGSPAGSPTSTEEGSSTPSGATGSPGSSPSASTGTGPGASPGTSSTGSPGTSESATPESGPGTSTEPSEGSAPGTSTEPSEGSAP

SEQ ID NO: 984 - protein, 981 aa, Artificial Sequence
  Description of Artificial Sequence: Synthetic polypeptide
MAEPAGSPTSTEEGTPGSGTASSSPGSSTPSGATGSPGASPGTSSTGSPGSPAGSPTSTEEGTSESATPESGPGTSTEPSEGSAPGSPAGSPTSTEEGTSTEPSEGSAPGTSTEPSEGSAPGTSESATPESGPGSEPATSGSETPGSEPATSGSETPGSPAGSPTSTEEGTSESATPESGPGTSTEPSEGSAPGTSTEPSEGSAPGSPAGSPTSTEEGTSTEPSEGSAPGTSTEPSEGSAPGTSESATPESGPGTSTEPSEGSAPGTSESATPESGPGSEPATSGSETPGTSTEPSEGSAPGTSTEPSEGSAPGTSESATPESGPGTSESATPESGPGSPAGSPTSTEEGTSESATPESGPGSEPATSGSETPGTSESATPESGPGTSTEPSEGSAPGTSTEPSEGSAPGTSTEPSEGSAPGTSTEPSEGSAPGTSTEPSEGSAPGTSTEPSEGSAPGSPAGSPTSTEEGTSTEPSEGSAPGTSESATPESGPGSEPATSGSETPGTSESATPESGPGSEPATSGSETPGTSESATPESGPGTSTEPSEGSAPGTSESATPESGPGSPAGSPTSTEEGSPAGSPTSTEEGSPAGSPTSTEEGTSESATPESGPGTSTEPSEGSAPGTSESATPESGPGSEPATSGSETPGTSESATPESGPGSEPATSGSETPGTSESATPESGPGTSTEPSEGSAPGSPAGSPTSTEEGTSESATPESGPGSEPATSGSETPGTSESATPESGPGSPAGSPTSTEEGSPAGSPTSTEEGTSTEPSEGSAPGTSESATPESGPGTSESATPESGPGTSESATPESGPGSEPATSGSETPGSEPATSGSETPGSPAGSPTSTEEGTSTEPSEGSAPGTSTEPSEGSAPGSEPATSGSETPGTSESATPESGPGTSTEPSEGSAPGAYRPSETLCGGELVDTLQFVCGDRGFYFSRPASRVSRRSRGIVEECCFRSCDLALLETYCATPAKSE

SEQ ID NO: 985 - protein, 992 aa, Artificial Sequence
  Description of Artificial Sequence: Synthetic polypeptide
MAEPAGSPTSTEEGASPGTSSTGSPGSSTPSGATGSPGSSTPSGATGSPGTSTEPSEGSAPGSEPATSGSETPGSPAGSPTSTEEGSTSSTAESPGPGTSTPESGSASPGSTSESPSGTAPGSTSESPSGTAPGTSTPESGSASPGTSTPESGSASPGSEPATSGSETPGTSESATPESGPGSPAGSPTSTEEGTSTEPSEGSAPGTSESATPESGPGTSTEPSEGSAPGTSTEPSEGSAPGSPAGSPTSTEEGTSTEPSEGSAPGTSTEPSEGSAPGTSESATPESGPGTSESATPESGPGTSTEPSEGSAPGTSTEPSEGSAPGTSESATPESGPGTSTEPSEGSAPGSEPATSGSETPGSPAGSPTSTEEGSSTPSGATGSPGTPGSGTASSSPGSSTPSGATGSPGTSTEPSEGSAPGTSTEPSEGSAPGSEPATSGSETPGSPAGSPTSTEEGSPAGSPTSTEEGTSTEPSEGSAPGASASGAPSTGGTSESATPESGPGSPAGSPTSTEEGSPAGSPTSTEEGSTSSTAESPGPGSTSESPSGTAPGTSPSGESSTAPGTPGSGTASSSPGSSTPSGATGSPGSSPSASTGTGPGSEPATSGSETPGTSESATPESGPGSEPATSGSETPGSTSSTAESPGPGSTSSTAESPGPGTSPSGESSTAPGSEPATSGSETPGSEPATSGSETPGTSTEPSEGSAPGSTSSTAESPGPGTSTPESGSASPGSTSESPSGTAPGTSTEPSEGSAPGTSTEPSEGSAPGTSTEPSEGSAPGSSTPSGATGSPGSSPSASTGTGPGASPGTSSTGSPGSEPATSGSETPGTSESATPESGPGSPAGSPTSTEEGSSTPSGATGSPGSSPSASTGTGPGASPGTSSTGSPGTSESATPESGPGTSTEPSEGSAPGTSTEPSEGSAPGAYRPSETLCGGELVDTLQFVCGDRGFYFSRPASRVSRRSRGIVEECCFRSCDLALLETYCATPAKSE

SEQ ID NO: 986 - protein, 212 aa, Artificial Sequence
  Description of Artificial Sequence: Synthetic polypeptide
GSEPATSGSETPGTSESATPESGPGSEPATSGSETPGSPAGSPTSTEEGTSTEPSEGSAPGSEPATSGSETPGSEPATSGSETPGSEPATSGSETPGTSTEPSEGSAPGTSESATPESGPGSEPATSGSETPGTSTEPSEGSAPGAYRPSETLCGGELVDTLQFVCGDRGFYFSRPASRVSRRSRGIVEECCFRSCDLALLETYCATPAKSE

SEQ ID NO: 987 - protein, 212 aa, Artificial Sequence
  Description of Artificial Sequence: Synthetic polypeptide
GTSTPESGSASPGTSPSGESSTAPGTSPSGESSTAPGSTSSTAESPGPGSTSESPSGTAPGSTSSTAESPGPGTSPSGESSTAPGTSTPESGSASPGSTSSTAESPGPGTSPSGESSTAPGTSPSGESSTAPGTSPSGESSTAPGAYRPSETLCGGELVDTLQFVCGDRGFYFSRPASRVSRRSRGIVEECCFRSCDLALLETYCATPAKSE

SEQ ID NO: 988 - protein, 356 aa, Artificial Sequence
  Description of Artificial Sequence: Synthetic polypeptide
GTSESATPESGPGSEPATSGSETPGTSESATPESGPGSEPATSGSETPGTSESATPESGPGTSTEPSEGSAPGSPAGSPTSTEEGTSESATPESGPGSEPATSGSETPGTSESATPESGPGSPAGSPTSTEEGSPAGSPTSTEEGTSTEPSEGSAPGTSESATPESGPGTSESATPESGPGTSESATPESGPGSEPATSGSETPGSEPATSGSETPGSPAGSPTSTEEGTSTEPSEGSAPGTSTEPSEGSAPGSEPATSGSETPGTSESATPESGPGTSTEPSEGSAPGAYRPSETLCGGELVDTLQFVCGDRGFYFSRPASRVSRRSRGIVEECCFRSCDLALLETYCATPAKSE

SEQ ID NO: 989 - protein, 644 aa, Artificial Sequence
  Description of Artificial Sequence: Synthetic polypeptide
GSPAGSPTSTEEGTSESATPESGPGTSTEPSEGSAPGSPAGSPTSTEEGTSTEPSEGSAPGTSTEPSEGSAPGTSESATPESGPGSEPATSGSETPGSEPATSGSETPGSPAGSPTSTEEGTSESATPESGPGTSTEPSEGSAPGTSTEPSEGSAPGSPAGSPTSTEEGTSTEPSEGSAPGTSTEPSEGSAPGTSESATPESGPGTSTEPSEGSAPGTSESATPESGPGSEPATSGSETPGTSTEPSEGSAPGTSTEPSEGSAPGTSESATPESGPGTSESATPESGPGSPAGSPTSTEEGTSESATPESGPGSEPATSGSETPGTSESATPESGPGTSTEPSEGSAPGTSTEPSEGSAPGTSTEPSEGSAPGTSTEPSEGSAPGTSTEPSEGSAPGTSTEPSEGSAPGSPAGSPTSTEEGTSTEPSEGSAPGTSESATPESGPGSEPATSGSETPGTSESATPESGPGSEPATSGSETPGTSESATPESGPGTSTEPSEGSAPGTSESATPESGPGSPAGSPTSTEEGSPAGSPTSTEEGSPAGSPTSTEEGTSESATPESGPGTSTEPSEGSAPGAYRPSETLCGGELVDTLQFVCGDRGFYFSRPASRVSRRSRGIVEECCFRSCDLALLETYCATPAKSE

SEQ ID NO: 990 - protein, 644 aa, Artificial Sequence
  Description of Artificial Sequence: Synthetic polypeptide
GSTSSTAESPGPGSTSSTAESPGPGSTSESPSGTAPGSTSSTAESPGPGSTSSTAESPGPGTSTPESGSASPGSTSESPSGTAPGTSPSGESSTAPGSTSESPSGTAPGSTSESPSGTAPGTSPSGESSTAPGSTSESPSGTAPGSTSESPSGTAPGTSPSGESSTAPGSTSESPSGTAPGSTSESPSGTAPGSTSESPSGTAPGTSTPESGSASPGSTSESPSGTAPGTSTPESGSASPGSTSSTAESPGPGSTSSTAESPGPGTSTPESGSASPGTSTPESGSASPGSTSESPSGTAPGTSTPESGSASPGTSTPESGSASPGSTSESPSGTAPGSTSESPSGTAPGSTSESPSGTAPGSTSSTAESPGPGTSTPESGSASPGTSTPESGSASPGSTSESPSGTAPGSTSESPSGTAPGTSTPESGSASPGSTSESPSGTAPGSTSESPSGTAPGTSTPESGSASPGTSPSGESSTAPGSTSSTAESPGPGTSPSGESSTAPGSTSSTAESPGPGTSTPESGSASPGSTSESPSGTAPGSTSSTAESPGPGTSTPESGSASPGTSTPESGSASPGAYRPSETLCGGELVDTLQFVCGDRGFYFSRPASRVSRRSRGIVEECCFRSCDLALLETYCATPAKSE

SEQ ID NO: 991 - protein, 904 aa, Artificial Sequence
  Description of Artificial Sequence: Synthetic polypeptide
GSSESGSSEGGPGSSESGSSEGGPGESPGGSSGSESGSGGEPSESGSSGESPGGSSGSESGESPGGSSGSESGSSESGSSEGGPGSSESGSSEGGPGSSESGSSEGGPGESPGGSSGSESGESPGGSSGSESGESPGGSSGSESGSSESGSSEGGPGSSESGSSEGGPGSSESGSSEGGPGSSESGSSEGGPGSSESGSSEGGPGSSESGSSEGGPGSGGEPSESGSSGESPGGSSGSESGESPGGSSGSESGSGGEPSESGSSGSEGSSGPGESSGSSESGSSEGGPGSGGEPSESGSSGSEGSSGPGESSGSSESGSSEGGPGSGGEPSESGSSGESPGGSSGSESGSGGEPSESGSSGSGGEPSESGSSGSSESGSSEGGPGSGGEPSESGSSGSGGEPSESGSSGSEGSSGPGESSGESPGGSSGSESGSEGSSGPGESSGSEGSSGPGESSGSGGEPSESGSSGSSESGSSEGGPGSSESGSSEGGPGESPGGSSGSESGSGGEPSESGSSGSEGSSGPGESSGESPGGSSGSESGSEGSSGPGSSESGSSEGGPGSGGEPSESGSSGSEGSSGPGESSGSEGSSGPGESSGSEGSSGPGESSGSGGEPSESGSSGSGGEPSESGSSGESPGGSSGSESGESPGGSSGSESGSGGEPSESGSSGSEGSSGPGESSGESPGGSSGSESGSSESGSSEGGPGSSESGSSEGGPGSSESGSSEGGPGSGGEPSESGSSGSSESGSSEGGPGESPGGSSGSESGSGGEPSESGSSGSSESGSSEGGPGESPGGSSGSESGSGGEPSESGSSGESPGGSSGSESGSGGEPSESGSSGAYRPSETLCGGELVDTLQFVCGDRGFYFSRPASRVSRRSRGIVEECCFRSCDLALLETYCATPAKSE

SEQ ID NO: 992 - protein, 932 aa, Artificial Sequence
  Description of Artificial Sequence: Synthetic polypeptide
GSPAGSPTSTEEGTSESATPESGPGTSTEPSEGSAPGSPAGSPTSTEEGTSTEPSEGSAPGTSTEPSEGSAPGTSESATPESGPGSEPATSGSETPGSEPATSGSETPGSPAGSPTSTEEGTSESATPESGPGTSTEPSEGSAPGTSTEPSEGSAPGSPAGSPTSTEEGTSTEPSEGSAPGTSTEPSEGSAPGTSESATPESGPGTSTEPSEGSAPGTSESATPESGPGSEPATSGSETPGTSTEPSEGSAPGTSTEPSEGSAPGTSESATPESGPGTSESATPESGPGSPAGSPTSTEEGTSESATPESGPGSEPATSGSETPGTSESATPESGPGTSTEPSEGSAPGTSTEPSEGSAPGTSTEPSEGSAPGTSTEPSEGSAPGTSTEPSEGSAPGTSTEPSEGSAPGSPAGSPTSTEEGTSTEPSEGSAPGTSESATPESGPGSEPATSGSETPGTSESATPESGPGSEPATSGSETPGTSESATPESGPGTSTEPSEGSAPGTSESATPESGPGSPAGSPTSTEEGSPAGSPTSTEEGSPAGSPTSTEEGTSESATPESGPGTSTEPSEGSAPGTSESATPESGPGSEPATSGSETPGTSESATPESGPGSEPATSGSETPGTSESATPESGPGTSTEPSEGSAPGSPAGSPTSTEEGTSESATPESGPGSEPATSGSETPGTSESATPESGPGSPAGSPTSTEEGSPAGSPTSTEEGTSTEPSEGSAPGTSESATPESGPGTSESATPESGPGTSESATPESGPGSEPATSGSETPGSEPATSGSETPGSPAGSPTSTEEGTSTEPSEGSAPGTSTEPSEGSAPGSEPATSGSETPGTSESATPESGPGTSTEPSEGSAPGAYRPSETLCGGELVDTLQFVCGDRGFYFSRPASRVSRRSRGIVEECCFRSCDLALLETYCATPAKSE

SEQ ID NO: 993 - protein, 943 aa, Artificial Sequence
  Description of Artificial Sequence: Synthetic polypeptide
  MOD_RES (430)..(432): Any amino acid
  MOD_RES (443)..(446): Any amino acid
GSTSESPSGTAPGTSPSGESSTAPGSTSESPSGTAPGSTSESPSGTAPGTSTPESGSASPGTSTPESGSASPGSTSESPSGTAPGSTSESPSGTAPGTSPSGESSTAPGSTSESPSGTAPGTSPSGESSTAPGTSPSGESSTAPGSTSSTAESPGPGTSPSGESSTAPGTSPSGESSTAPGSTSSTAESPGPGTSTPESGSASPGTSTPESGSASPGSTSESPSGTAPGSTSESPSGTAPGTSTPESGSASPGSTSSTAESPGPGTSTPESGSASPGSTSESPSGTAPGTSPSGESSTAPGSTSSTAESPGPGTSPSGESSTAPGTSTPESGSASPGSTSSTAESPGPGSTSSTAESPGPGSTSSTAESPGPGSTSSTAESPGPGTSPSGESSTAPGSTSESPSGTAPGSTSESPSGTAPGTSTPESGPXXXGASASGAPSTXXXXSESPSGTAPGSTSESPSGTAPGSTSESPSGTAPGSTSESPSGTAPGSTSESPSGTAPGSTSESPSGTAPGTSTPESGSASPGTSPSGESSTAPGTSPSGESSTAPGSTSSTAESPGPGTSPSGESSTAPGTSTPESGSASPGSTSESPSGTAPGSTSESPSGTAPGTSPSGESSTAPGSTSESPSGTAPGTSTPESGSASPGTSTPESGSASPGSTSESPSGTAPGTSTPESGSASPGSTSSTAESPGPGSTSESPSGTAPGSTSESPSGTAPGTSPSGESSTAPGSTSSTAESPGPGTSPSGESSTAPGTSTPESGSASPGTSPSGESSTAPGTSPSGESSTAPGTSPSGESSTAPGSTSSTAESPGPGSTSSTAESPGPGTSPSGESSTAPGSSPSASTGTGPGSSTPSGATGSPGSSTPSGATGSPGAYRPSETLCGGELVDTLQFVCGDRGFYFSRPASRVSRRSRGIVEECCFRSCDLALLETYCATPAKSE

SEQ ID NO: 994 - protein, 932 aa, Artificial Sequence
  Description of Artificial Sequence: Synthetic polypeptide
GASPGTSSTGSPGSSPSASTGTGPGSSPSASTGTGPGTPGSGTASSSPGSSTPSGATGSPGSNPSASTGTGPGASPGTSSTGSPGTPGSGTASSSPGSSTPSGATGSPGTPGSGTASSSPGASPGTSSTGSPGASPGTSSTGSPGTPGSGTASSSPGSSTPSGATGSPGASPGTSSTGSPGTPGSGTASSSPGSSTPSGATGSPGSNPSASTGTGPGSSPSASTGTGPGSSTPSGATGSPGSSTPSGATGSPGASPGTSSTGSPGASPGTSSTGSPGASPGTSSTGSPGTPGSGTASSSPGASPGTSSTGSPGASPGTSSTGSPGASPGTSSTGSPGSSPSASTGTGPGTPGSGTASSSPGASPGTSSTGSPGASPGTSSTGSPGASPGTSSTGSPGSSTPSGATGSPGSSTPSGATGSPGASPGTSSTGSPGTPGSGTASSSPGSSTPSGATGSPGSSTPSGATGSPGSSTPSGATGSPGSSPSASTGTGPGASPGTSSTGSPGASPGTSSTGSPGTPGSGTASSSPGASPGTSSTGSPGASPGTSSTGSPGASPGTSSTGSPGASPGTSSTGSPGTPGSGTASSSPGSSTPSGATGSPGTPGSGTASSSPGSSTPSGATGSPGTPGSGTASSSPGSSTPSGATGSPGSSTPSGATGSPGSSPSASTGTGPGSSPSASTGTGPGASPGTSSTGSPGTPGSGTASSSPGSSTPSGATGSPGSSPSASTGTGPGSSPSASTGTGPGASPGTSSTGSPGASPGTSSTGSPGSSTPSGATGSPGSSPSASTGTGPGASPGTSSTGSPGSSPSASTGTGPGTPGSGTASSSPGSSTPSGATGSPGSSTPSGATGSPGASPGTSSTGSPGAYRPSETLCGGELVDTLQFVCGDRGFYFSRPASRVSRRSRGIVEECCFRSCDLALLETYCATPAKSE

SEQ ID NO: 995 - protein, 943 aa, Artificial Sequence
  Description of Artificial Sequence: Synthetic polypeptide
GTSTEPSEGSAPGSEPATSGSETPGSPAGSPTSTEEGSTSSTAESPGPGTSTPESGSASPGSTSESPSGTAPGSTSESPSGTAPGTSTPESGSASPGTSTPESGSASPGSEPATSGSETPGTSESATPESGPGSPAGSPTSTEEGTSTEPSEGSAPGTSESATPESGPGTSTEPSEGSAPGTSTEPSEGSAPGSPAGSPTSTEEGTSTEPSEGSAPGTSTEPSEGSAPGTSESATPESGPGTSESATPESGPGTSTEPSEGSAPGTSTEPSEGSAPGTSESATPESGPGTSTEPSEGSAPGSEPATSGSETPGSPAGSPTSTEEGSSTPSGATGSPGTPGSGTASSSPGSSTPSGATGSPGTSTEPSEGSAPGTSTEPSEGSAPGSEPATSGSETPGSPAGSPTSTEEGSPAGSPTSTEEGTSTEPSEGSAPGASASGAPSTGGTSESATPESGPGSPAGSPTSTEEGSPAGSPTSTEEGSTSSTAESPGPGSTSESPSGTAPGTSPSGESSTAPGTPGSGTASSSPGSSTPSGATGSPGSSPSASTGTGPGSEPATSGSETPGTSESATPESGPGSEPATSGSETPGSTSSTAESPGPGSTSSTAESPGPGTSPSGESSTAPGSEPATSGSETPGSEPATSGSETPGTSTEPSEGSAPGSTSSTAESPGPGTSTPESGSASPGSTSESPSGTAPGTSTEPSEGSAPGTSTEPSEGSAPGTSTEPSEGSAPGSSTPSGATGSPGSSPSASTGTGPGASPGTSSTGSPGSEPATSGSETPGTSESATPESGPGSPAGSPTSTEEGSSTPSGATGSPGSSPSASTGTGPGASPGTSSTGSPGTSESATPESGPGTSTEPSEGSAPGTSTEPSEGSAPGAYRPSETLCGGELVDTLQFVCGDRGFYFSRPASRVSRRSRGIVEECCFRSCDLALLETYCATPAKSE

SEQ ID NO: 996 - protein, 294 aa, Artificial Sequence
  Description of Artificial Sequence: Synthetic polypeptide
EESQKKLPSSRITCPQGSVAYGSYCYSLILIPQTWSNAELSCQMHFSGHLAFLLSTGEITFVSSLVKNSLTAYQYIWIGLHDPSHGTLPNGSGWKWSSSNVLTFYNWERNPSIAADRGYCAVLSQKSGFQKWRDFNCENELPYICKFKVGGSEPATSGSETPGTSESATPESGPGSEPATSGSETPGSPAGSPTSTEEGTSTEPSEGSAPGSEPATSGSETPGSEPATSGSETPGSEPATSGSETPGTSTEPSEGSAPGTSESATPESGPGSEPATSGSETPGTSTEPSEGSAP

SEQ ID NO: 997 - protein, 294 aa, Artificial Sequence
  Description of Artificial Sequence: Synthetic polypeptide
EESQKKLPSSRITCPQGSVAYGSYCYSLILIPQTWSNAELSCQMHFSGHLAFLLSTGEITFVSSLVKNSLTAYQYIWIGLHDPSHGTLPNGSGWKWSSSNVLTFYNWERNPSIAADRGYCAVLSQKSGFQKWRDFNCENELPYICKFKVGGTSTPESGSASPGTSPSGESSTAPGTSPSGESSTAPGSTSSTAESPGPGSTSESPSGTAPGSTSSTAESPGPGTSPSGESSTAPGTSTPESGSASPGSTSSTAESPGPGTSPSGESSTAPGTSPSGESSTAPGTSPSGESSTAP

SEQ ID NO: 998 - protein, 438 aa, Artificial Sequence
  Description of Artificial Sequence: Synthetic polypeptide
EESQKKLPSSRITCPQGSVAYGSYCYSLILIPQTWSNAELSCQMHFSGHLAFLLSTGEITFVSSLVKNSLTAYQYIWIGLHDPSHGTLPNGSGWKWSSSNVLTFYNWERNPSIAADRGYCAVLSQKSGFQKWRDFNCENELPYICKFKVGGTSESATPESGPGSEPATSGSETPGTSESATPESGPGSEPATSGSETPGTSESATPESGPGTSTEPSEGSAPGSPAGSPTSTEEGTSESATPESGPGSEPATSGSETPGTSESATPESGPGSPAGSPTSTEEGSPAGSPTSTEEGTSTEPSEGSAPGTSESATPESGPGTSESATPESGPGTSESATPESGPGSEPATSGSETPGSEPATSGSETPGSPAGSPTSTEEGTSTEPSEGSAPGTSTEPSEGSAPGSEPATSGSETPGTSESATPESGPGTSTEPSEGSAP

SEQ ID NO: 999 - protein, 726 aa, Artificial Sequence
  Description of Artificial Sequence: Synthetic polypeptide
EESQKKLPSSRITCPQGSVAYGSYCYSLILIPQTWSNAELSCQMHFSGHLAFLLSTGEITFVSSLVKNSLTAYQYIWIGLHDPSHGTLPNGSGWKWSSSNVLTFYNWERNPSIAADRGYCAVLSQKSGFQKWRDFNCENELPYICKFKVGGSPAGSPTSTEEGTSESATPESGPGTSTEPSEGSAPGSPAGSPTSTEEGTSTEPSEGSAPGTSTEPSEGSAPGTSESATPESGPGSEPATSGSETPGSEPATSGSETPGSPAGSPTSTEEGTSESATPESGPGTSTEPSEGSAPGTSTEPSEGSAPGSPAGSPTSTEEGTSTEPSEGSAPGTSTEPSEGSAPGTSESATPESGPGTSTEPSEGSAPGTSESATPESGPGSEPATSGSETPGTSTEPSEGSAPGTSTEPSEGSAPGTSESATPESGPGTSESATPESGPGSPAGSPTSTEEGTSESATPESGPGSEPATSGSETPGTSESATPESGPGTSTEPSEGSAPGTSTEPSEGSAPGTSTEPSEGSAPGTSTEPSEGSAPGTSTEPSEGSAPGTSTEPSEGSAPGSPAGSPTSTEEGTSTEPSEGSAPGTSESATPESGPGSEPATSGSETPGTSESATPESGPGSEPATSGSETPGTSESATPESGPGTSTEPSEGSAPGTSESATPESGPGSPAGSPTSTEEGSPAGSPTSTEEGSPAGSPTSTEEGTSESATPESGPGTSTEPSEGSAP

SEQ ID NO: 1000 - protein, 726 aa, Artificial Sequence
  Description of Artificial Sequence: Synthetic polypeptide
EESQKKLPSSRITCPQGSVAYGSYCYSLILIPQTWSNAELSCQMHFSGHLAFLLSTGEITFVSSLVKNSLTAYQYIWIGLHDPSHGTLPNGSGWKWSSSNVLTFYNWERNPSIAADRGYCAVLSQKSGFQKWRDFNCENELPYICKFKVGGSTSSTAESPGPGSTSSTAESPGPGSTSESPSGTAPGSTSSTAESPGPGSTSSTAESPGPGTSTPESGSASPGSTSESPSGTAPGTSPSGESSTAPGSTSESPSGTAPGSTSESPSGTAPGTSPSGESSTAPGSTSESPSGTAPGSTSESPSGTAPGTSPSGESSTAPGSTSESPSGTAPGSTSESPSGTAPGSTSESPSGTAPGTSTPESGSASPGSTSESPSGTAPGTSTPESGSASPGSTSSTAESPGPGSTSSTAESPGPGTSTPESGSASPGTSTPESGSASPGSTSESPSGTAPGTSTPESGSASPGTSTPESGSASPGSTSESPSGTAPGSTSESPSGTAPGSTSESPSGTAPGSTSSTAESPGPGTSTPESGSASPGTSTPESGSASPGSTSESPSGTAPGSTSESPSGTAPGTSTPESGSASPGSTSESPSGTAPGSTSESPSGTAPGTSTPESGSASPGTSPSGESSTAPGSTSSTAESPGPGTSPSGESSTAPGSTSSTAESPGPGTSTPESGSASPGSTSESPSGTAPGSTSSTAESPGPGTSTPESGSASPGTSTPESGSASP

SEQ ID NO: 1001 - protein, 986 aa, Artificial Sequence
  Description of Artificial Sequence: Synthetic polypeptide
EESQKKLPSSRITCPQGSVAYGSYCYSLILIPQTWSNAELSCQMHFSGHLAFLLSTGEITFVSSLVKNSLTAYQYIWIGLHDPSHGTLPNGSGWKWSSSNVLTFYNWERNPSIAADRGYCAVLSQKSGFQKWRDFNCENELPYICKFKVGGSSESGSSEGGPGSSESGSSEGGPGESPGGSSGSESGSGGEPSESGSSGESPGGSSGSESGESPGGSSGSESGSSESGSSEGGPGSSESGSSEGGPGSSESGSSEGGPGESPGGSSGSESGESPGGSSGSESGESPGGSSGSESGSSESGSSEGGPGSSESGSSEGGPGSSESGSSEGGPGSSESGSSEGGPGSSESGSSEGGPGSSESGSSEGGPGSGGEPSESGSSGESPGGSSGSESGESPGGSSGSESGSGGEPSESGSSGSEGSSGPGESSGSSESGSSEGGPGSGGEPSESGSSGSEGSSGPGESSGSSESGSSEGGPGSGGEPSESGSSGESPGGSSGSESGSGGEPSESGSSGSGGEPSESGSSGSSESGSSEGGPGSGGEPSESGSSGSGGEPSESGSSGSEGSSGPGESSGESPGGSSGSESGSEGSSGPGESSGSEGSSGPGESSGSGGEPSESGSSGSSESGSSEGGPGSSESGSSEGGPGESPGGSSGSESGSGGEPSESGSSGSEGSSGPGESSGESPGGSSGSESGSEGSSGPGSSESGSSEGGPGSGGEPSESGSSGSEGSSGPGESSGSEGSSGPGESSGSEGSSGPGESSGSGGEPSESGSSGSGGEPSESGSSGESPGGSSGSESGESPGGSSGSESGSGGEPSESGSSGSEGSSGPGESSGESPGGSSGSESGSSESGSSEGGPGSSESGSSEGGPGSSESGSSEGGPGSGGEPSESGSSGSSESGSSEGGPGESPGGSSGSESGSGGEPSESGSSGSSESGSSEGGPGESPGGSSGSESGSGGEPSESGSSGESPGGSSGSESGSGGEPSESGSS

SEQ ID NO: 1002 - protein, 1014 aa, Artificial Sequence
  Description of Artificial Sequence: Synthetic polypeptide
EESQKKLPSSRITCPQGSVAYGSYCYSLILIPQTWSNAELSCQMHFSGHLAFLLSTGEITFVSSLVKNSLTAYQYIWIGLHDPSHGTLPNGSGWKWSSSNVLTFYNWERNPSIAADRGYCAVLSQKSGFQKWRDFNCENELPYICKFKVGGSPAGSPTSTEEGTSESATPESGPGTSTEPSEGSAPGSPAGSPTSTEEGTSTEPSEGSAPGTSTEPSEGSAPGTSESATPESGPGSEPATSGSETPGSEPATSGSETPGSPAGSPTSTEEGTSESATPESGPGTSTEPSEGSAPGTSTEPSEGSAPGSPAGSPTSTEEGTSTEPSEGSAPGTSTEPSEGSAPGTSESATPESGPGTSTEPSEGSAPGTSESATPESGPGSEPATSGSETPGTSTEPSEGSAPGTSTEPSEGSAPGTSESATPESGPGTSESATPESGPGSPAGSPTSTEEGTSESATPESGPGSEPATSGSETPGTSESATPESGPGTSTEPSEGSAPGTSTEPSEGSAPGTSTEPSEGSAPGTSTEPSEGSAPGTSTEPSEGSAPGTSTEPSEGSAPGSPAGSPTSTEEGTSTEPSEGSAPGTSESATPESGPGSEPATSGSETPGTSESATPESGPGSEPATSGSETPGTSESATPESGPGTSTEPSEGSAPGTSESATPESGPGSPAGSPTSTEEGSPAGSPTSTEEGSPAGSPTSTEEGTSESATPESGPGTSTEPSEGSAPGTSESATPESGPGSEPATSGSETPGTSESATPESGPGSEPATSGSETPGTSESATPESGPGTSTEPSEGSAPGSPAGSPTSTEEGTSESATPESGPGSEPATSGSETPGTSESATPESGPGSPAGSPTSTEEGSPAGSPTSTEEGTSTEPSEGSAPGTSESATPESGPGTSESATPESGPGTSESATPESGPGSEPATSGSETPGSEPATSGSETPGSPAGSPTSTEEGTSTEPSEGSAPGTSTEPSEGSAPGSEPATSGSETPGTSESATPESGPGTSTEPSEGSAP

SEQ ID NO: 1003 - protein, 1025 aa, Artificial Sequence
  Description of Artificial Sequence: Synthetic polypeptide
  MOD_RES (580)..(582): Any amino acid
  MOD_RES (593)..(596): Any amino acid
EESQKKLPSSRITCPQGSVAYGSYCYSLILIPQTWSNAELSCQMHFSGHLAFLLSTGEITFVSSLVKNSLTAYQYIWIGLHDPSHGTLPNGSGWKWSSSNVLTFYNWERNPSIAADRGYCAVLSQKSGFQKWRDFNCENELPYICKFKVGGSTSESPSGTAPGTSPSGESSTAPGSTSESPSGTAPGSTSESPSGTAPGTSTPESGSASPGTSTPESGSASPGSTSESPSGTAPGSTSESPSGTAPGTSPSGESSTAPGSTSESPSGTAPGTSPSGESSTAPGTSPSGESSTAPGSTSSTAESPGPGTSPSGESSTAPGTSPSGESSTAPGSTSSTAESPGPGTSTPESGSASPGTSTPESGSASPGSTSESPSGTAPGSTSESPSGTAPGTSTPESGSASPGSTSSTAESPGPGTSTPESGSASPGSTSESPSGTAPGTSPSGESSTAPGSTSSTAESPGPGTSPSGESSTAPGTSTPESGSASPGSTSSTAESPGPGSTSSTAESPGPGSTSSTAESPGPGSTSSTAESPGPGTSPSGESSTAPGSTSESPSGTAPGSTSESPSGTAPGTSTPESGPXXXGASASGAPSTXXXXSESPSGTAPGSTSESPSGTAPGSTSESPSGTAPGSTSESPSGTAPGSTSESPSGTAPGSTSESPSGTAPGTSTPESGSASPGTSPSGESSTAPGTSPSGESSTAPGSTSSTAESPGPGTSPSGESSTAPGTSTPESGSASPGSTSESPSGTAPGSTSESPSGTAPGTSPSGESSTAPGSTSESPSGTAPGTSTPESGSASPGTSTPESGSASPGSTSESPSGTAPGTSTPESGSASPGSTSSTAESPGPGSTSESPSGTAPGSTSESPSGTAPGTSPSGESSTAPGSTSSTAESPGPGTSPSGESSTAPGTSTPESGSASPGTSPSGESSTAPGTSPSGESSTAPGTSPSGESSTAPGSTSSTAESPGPGSTSSTAESPGPGTSPSGESSTAPGSSPSASTGTGPGSSTPSGATGSPGSSTPSGATGSP

SEQ ID NO: 1004 - protein, 1014 aa, Artificial Sequence
  Description of Artificial Sequence: Synthetic polypeptide
EESQKKLPSSRITCPQGSVAYGSYCYSLILIPQTWSNAELSCQMHFSGHLAFLLSTGEITFVSSLVKNSLTAYQYIWIGLHDPSHGTLPNGSGWKWSSSNVLTFYNWERNPSIAADRGYCAVLSQKSGFQKWRDFNCENELPYICKFKVGGASPGTSSTGSPGSSPSASTGTGPGSSPSASTGTGPGTPGSGTASSSPGSSTPSGATGSPGSNPSASTGTGPGASPGTSSTGSPGTPGSGTASSSPGSSTPSGATGSPGTPGSGTASSSPGASPGTSSTGSPGASPGTSSTGSPGTPGSGTASSSPGSSTPSGATGSPGASPGTSSTGSPGTPGSGTASSSPGSSTPSGATGSPGSNPSASTGTGPGSSPSASTGTGPGSSTPSGATGSPGSSTPSGATGSPGASPGTSSTGSPGASPGTSSTGSPGASPGTSSTGSPGTPGSGTASSSPGASPGTSSTGSPGASPGTSSTGSPGASPGTSSTGSPGSSPSASTGTGPGTPGSGTASSSPGASPGTSSTGSPGASPGTSSTGSPGASPGTSSTGSPGSSTPSGATGSPGSSTPSGATGSPGASPGTSSTGSPGTPGSGTASSSPGSSTPSGATGSPGSSTPSGATGSPGSSTPSGATGSPGSSPSASTGTGPGASPGTSSTGSPGASPGTSSTGSPGTPGSGTASSSPGASPGTSSTGSPGASPGTSSTGSPGASPGTSSTGSPGASPGTSSTGSPGTPGSGTASSSPGSSTPSGATGSPGTPGSGTASSSPGSSTPSGATGSPGTPGSGTASSSPGSSTPSGATGSPGSSTPSGATGSPGSSPSASTGTGPGSSPSASTGTGPGASPGTSSTGSPGTPGSGTASSSPGSSTPSGATGSPGSSPSASTGTGPGSSPSASTGTGPGASPGTSSTGSPGASPGTSSTGSPGSSTPSGATGSPGSSPSASTGTGPGASPGTSSTGSPGSSPSASTGTGPGTPGSGTASSSPGSSTPSGATGSPGSSTPSGATGSPGASPGTSSTGSP

SEQ ID NO: 1005 - protein, 1025 aa, Artificial Sequence
  Description of Artificial Sequence: Synthetic polypeptide
EESQKKLPSSRITCPQGSVAYGSYCYSLILIPQTWSNAELSCQMHFSGHLAFLLSTGEITFVSSLVKNSLTAYQYIWIGLHDPSHGTLPNGSGWKWSSSNVLTFYNWERNPSIAADRGYCAVLSQKSGFQKWRDFNCENELPYICKFKVGGTSTEPSEGSAPGSEPATSGSETPGSPAGSPTSTEEGSTSSTAESPGPGTSTPESGSASPGSTSESPSGTAPGSTSESPSGTAPGTSTPESGSASPGTSTPESGSASPGSEPATSGSETPGTSESATPESGPGSPAGSPTSTEEGTSTEPSEGSAPGTSESATPESGPGTSTEPSEGSAPGTSTEPSEGSAPGSPAGSPTSTEEGTSTEPSEGSAPGTSTEPSEGSAPGTSESATPESGPGTSESATPESGPGTSTEPSEGSAPGTSTEPSEGSAPGTSESATPESGPGTSTEPSEGSAPGSEPATSGSETPGSPAGSPTSTEEGSSTPSGATGSPGTPGSGTASSSPGSSTPSGATGSPGTSTEPSEGSAPGTSTEPSEGSAPGSEPATSGSETPGSPAGSPTSTEEGSPAGSPTSTEEGTSTEPSEGSAPGASASGAPSTGGTSESATPESGPGSPAGSPTSTEEGSPAGSPTSTEEGSTSSTAESPGPGSTSESPSGTAPGTSPSGESSTAPGTPGSGTASSSPGSSTPSGATGSPGSSPSASTGTGPGSEPATSGSETPGTSESATPESGPGSEPATSGSETPGSTSSTAESPGPGSTSSTAESPGPGTSPSGESSTAPGSEPATSGSETPGSEPATSGSETPGTSTEPSEGSAPGSTSSTAESPGPGTSTPESGSASPGSTSESPSGTAPGTSTEPSEGSAPGTSTEPSEGSAPGTSTEPSEGSAPGSSTPSGATGSPGSSPSASTGTGPGASPGTSSTGSPGSEPATSGSETPGTSESATPESGPGSPAGSPTSTEEGSSTPSGATGSPGSSPSASTGTGPGASPGTSSTGSPGTSESATPESGPGTSTEPSEGSAPGTSTEPSEGSAP

SEQ ID NO: 1006 - protein, 1468 aa, Artificial Sequence
  Description of Artificial Sequence: Synthetic polypeptide
EESQKKLPSSRITCPQGSVAYGSYCYSLILIPQTWSNAELSCQMHFSGHLAFLLSTGEITFVSSLVKNSLTAYQYIWIGLHDPSHGTLPNGSGWKWSSSNVLTFYNWERNPSIAADRGYCAVLSQKSGFQKWRDFNCENELPYICKFKVGGTSTEPSEGSAPGSEPATSGSETPGSPAGSPTSTEEGSTSSTAESPGPGTSTPESGSASPGSTSESPSGTAPGSTSESPSGTAPGTSTPESGSASPGTSTPESGSASPGSEPATSGSETPGTSESATPESGPGSPAGSPTSTEEGTSTEPSEGSAPGTSESATPESGPGTSTEPSEGSAPGTSTEPSEGSAPGSPAGSPTSTEEGTSTEPSEGSAPGTSTEPSEGSAPGTSESATPESGPGTSESATPESGPGTSTEPSEGSAPGTSTEPSEGSAPGTSESATPESGPGTSTEPSEGSAPGSEPATSGSETPGSPAGSPTSTEEGSSTPSGATGSPGTPGSGTASSSPGSSTPSGATGSPGTSTEPSEGSAPGTSTEPSEGSAPGSEPATSGSETPGSPAGSPTSTEEGSPAGSPTSTEEGTSTEPSEGSAPGPEPTGPAPSGGSEPATSGSETPGTSESATPESGPGSPAGSPTSTEEGTSESATPESGPGSPAGSPTSTEEGSPAGSPTSTEEGTSESATPESGPGSPAGSPTSTEEGSPAGSPTSTEEGSTSSTAESPGPGSTSESPSGTAPGTSPSGESSTAPGSTSESPSGTAPGSTSESPSGTAPGTSPSGESSTAPGTSTEPSEGSAPGTSESATPESGPGTSESATPESGPGSEPATSGSETPGTSESATPESGPGTSESATPESGPGTSTEPSEGSAPGTSESATPESGPGTSTEPSEGSAPGTSPSGESSTAPGTSPSGESSTAPGTSPSGESSTAPGTSTEPSEGSAPGSPAGSPTSTEEGTSTEPSEGSAPGSSPSASTGTGPGSSTPSGATGSPGSSTPSGATGSPGSSTPSGATGSPGSSTPSGATGSPGASPGTSSTGSPGASASGAPSTGGTSPSGESSTAPGSTSSTAESPGPGTSPSGESSTAPGTSESATPESGPGTSTEPSEGSAPGTSTEPSEGSAPGSSPSASTGTGPGSSTPSGATGSPGASPGTSSTGSPGTSTPESGSASPGTSPSGESSTAPGTSPSGESSTAPGTSESATPESGPGSEPATSGSETPGTSTEPSEGSAPGSTSESPSGTAPGSTSESPSGTAPGTSTPESGSASPGSPAGSPTSTEEGTSESATPESGPGTSTEPSEGSAPGSPAGSPTSTEEGTSESATPESGPGSEPATSGSETPGSSTPSGATGSPGASPGTSSTGSPGSSTPSGATGSPGSTSESPSGTAPGTSPSGESSTAPGSTSSTAESPGPGSSTPSGATGSPGASPGTSSTGSPGTPGSGTASSSPGSPAGSPTSTEEGSPAGSPTSTEEGTSTEPSEGSAP

SEQ ID NO: 1007 - protein, 1063 aa, Artificial Sequence
  Description of Artificial Sequence: Synthetic polypeptide
MAEPAGSPTSTEEGTPGSGTASSSPGSSTPSGATGSPGASPGTSSTGSPGSPAGSPTSTEEGTSESATPESGPGTSTEPSEGSAPGSPAGSPTSTEEGTSTEPSEGSAPGTSTEPSEGSAPGTSESATPESGPGSEPATSGSETPGSEPATSGSETPGSPAGSPTSTEEGTSESATPESGPGTSTEPSEGSAPGTSTEPSEGSAPGSPAGSPTSTEEGTSTEPSEGSAPGTSTEPSEGSAPGTSESATPESGPGTSTEPSEGSAPGTSESATPESGPGSEPATSGSETPGTSTEPSEGSAPGTSTEPSEGSAPGTSESATPESGPGTSESATPESGPGSPAGSPTSTEEGTSESATPESGPGSEPATSGSETPGTSESATPESGPGTSTEPSEGSAPGTSTEPSEGSAPGTSTEPSEGSAPGTSTEPSEGSAPGTSTEPSEGSAPGTSTEPSEGSAPGSPAGSPTSTEEGTSTEPSEGSAPGTSESATPESGPGSEPATSGSETPGTSESATPESGPGSEPATSGSETPGTSESATPESGPGTSTEPSEGSAPGTSESATPESGPGSPAGSPTSTEEGSPAGSPTSTEEGSPAGSPTSTEEGTSESATPESGPGTSTEPSEGSAPGTSESATPESGPGSEPATSGSETPGTSESATPESGPGSEPATSGSETPGTSESATPESGPGTSTEPSEGSAPGSPAGSPTSTEEGTSESATPESGPGSEPATSGSETPGTSESATPESGPGSPAGSPTSTEEGSPAGSPTSTEEGTSTEPSEGSAPGTSESATPESGPGTSESATPESGPGTSESATPESGPGSEPATSGSETPGSEPATSGSETPGSPAGSPTSTEEGTSTEPSEGSAPGTSTEPSEGSAPGSEPATSGSETPGTSESATPESGPGTSTEPSEGSAPGEESQKKLPSSRITCPQGSVAYGSYCYSLILIPQTWSNAELSCQMHFSGHLAFLLSTGEITFVSSLVKNSLTAYQYIWIGLHDPSHGTLPNGSGWKWSSSNVLTFYNWERNPSIAADRGYCAVLSQKSGFQKWRDFNCENELPYICKFKV

SEQ ID NO: 1008 - protein, 1074 aa, Artificial Sequence
  Description of Artificial Sequence: Synthetic polypeptide
MAEPAGSPTSTEEGASPGTSSTGSPGSSTPSGATGSPGSSTPSGATGSPGTSTEPSEGSAPGSEPATSGSETPGSPAGSPTSTEEGSTSSTAESPGPGTSTPESGSASPGSTSESPSGTAPGSTSESPSGTAPGTSTPESGSASPGTSTPESGSASPGSEPATSGSETPGTSESATPESGPGSPAGSPTSTEEGTSTEPSEGSAPGTSESATPESGPGTSTEPSEGSAPGTSTEPSEGSAPGSPAGSPTSTEEGTSTEPSEGSAPGTSTEPSEGSAPGTSESATPESGPGTSESATPESGPGTSTEPSEGSAPGTSTEPSEGSAPGTSESATPESGPGTSTEPSEGSAPGSEPATSGSETPGSPAGSPTSTEEGSSTPSGATGSPGTPGSGTASSSPGSSTPSGATGSPGTSTEPSEGSAPGTSTEPSEGSAPGSEPATSGSETPGSPAGSPTSTEEGSPAGSPTSTEEGTSTEPSEGSAPGASASGAPSTGGTSESATPESGPGSPAGSPTSTEEGSPAGSPTSTEEGSTSSTAESPGPGSTSESPSGTAPGTSPSGESSTAPGTPGSGTASSSPGSSTPSGATGSPGSSPSASTGTGPGSEPATSGSETPGTSESATPESGPGSEPATSGSETPGSTSSTAESPGPGSTSSTAESPGPGTSPSGESSTAPGSEPATSGSETPGSEPATSGSETPGTSTEPSEGSAPGSTSSTAESPGPGTSTPESGSASPGSTSESPSGTAPGTSTEPSEGSAPGTSTEPSEGSAPGTSTEPSEGSAPGSSTPSGATGSPGSSPSASTGTGPGASPGTSSTGSPGSEPATSGSETPGTSESATPESGPGSPAGSPTSTEEGSSTPSGATGSPGSSPSASTGTGPGASPGTSSTGSPGTSESATPESGPGTSTEPSEGSAPGTSTEPSEGSAPGEESQKKLPSSRITCPQGSVAYGSYCYSLILIPQTWSNAELSCQMHFSGHLAFLLSTGEITFVSSLVKNSLTAYQYIWIGLHDPSHGTLPNGSGWKWSSSNVLTFYNWERNPSIAADRGYCAVLSQKSGFQKWRDFNCENELPYICKFKV

SEQ ID NO: 1009 - protein, 294 aa, Artificial Sequence
  Description of Artificial Sequence: Synthetic polypeptide
GSEPATSGSETPGTSESATPESGPGSEPATSGSETPGSPAGSPTSTEEGTSTEPSEGSAPGSEPATSGSETPGSEPATSGSETPGSEPATSGSETPGTSTEPSEGSAPGTSESATPESGPGSEPATSGSETPGTSTEPSEGSAPGEESQKKLPSSRITCPQGSVAYGSYCYSLILIPQTWSNAELSCQMHFSGHLAFLLSTGEITFVSSLVKNSLTAYQYIWIGLHDPSHGTLPNGSGWKWSSSNVLTFYNWERNPSIAADRGYCAVLSQKSGFQKWRDFNCENELPYICKFKV

SEQ ID NO: 1010 - protein, 294 aa, Artificial Sequence
  Description of Artificial Sequence: Synthetic polypeptide
GTSTPESGSASPGTSPSGESSTAPGTSPSGESSTAPGSTSSTAESPGPGSTSESPSGTAPGSTSSTAESPGPGTSPSGESSTAPGTSTPESGSASPGSTSSTAESPGPGTSPSGESSTAPGTSPSGESSTAPGTSPSGESSTAPGEESQKKLPSSRITCPQGSVAYGSYCYSLILIPQTWSNAELSCQMHFSGHLAFLLSTGEITFVSSLVKNSLTAYQYIWIGLHDPSHGTLPNGSGWKWSSSNVLTFYNWERNPSIAADRGYCAVLSQKSGFQKWRDFNCENELPYICKFKV

SEQ ID NO: 1011 - protein, 438 aa, Artificial Sequence
  Description of Artificial Sequence: Synthetic polypeptide
GTSESATPESGPGSEPATSGSETPGTSESATPESGPGSEPATSGSETPGTSESATPESGPGTSTEPSEGSAPGSPAGSPTSTEEGTSESATPESGPGSEPATSGSETPGTSESATPESGPGSPAGSPTSTEEGSPAGSPTSTEEGTSTEPSEGSAPGTSESATPESGPGTSESATPESGPGTSESATPESGPGSEPATSGSETPGSEPATSGSETPGSPAGSPTSTEEGTSTEPSEGSAPGTSTEPSEGSAPGSEPATSGSETPGTSESATPESGPGTSTEPSEGSAPGEESQKKLPSSRITCPQGSVAYGSYCYSLILIPQTWSNAELSCQMHFSGHLAFLLSTGEITFVSSLVKNSLTAYQYIWIGLHDPSHGTLPNGSGWKWSSSNVLTFYNWERNPSIAADRGYCAVLSQKSGFQKWRDFNCENELPYICKFKV

SEQ ID NO: 1012 - protein, 726 aa, Artificial Sequence
  Description of Artificial Sequence: Synthetic polypeptide
GSPAGSPTSTEEGTSESATPESGPGTSTEPSEGSAPGSPAGSPTSTEEGTSTEPSEGSAPGTSTEPSEGSAPGTSESATPESGPGSEPATSGSETPGSEPATSGSETPGSPAGSPTSTEEGTSESATPESGPGTSTEPSEGSAPGTSTEPSEGSAPGSPAGSPTSTEEGTSTEPSEGSAPGTSTEPSEGSAPGTSESATPESGPGTSTEPSEGSAPGTSESATPESGPGSEPATSGSETPGTSTEPSEGSAPGTSTEPSEGSAPGTSESATPESGPGTSESATPESGPGSPAGSPTSTEEGTSESATPESGPGSEPATSGSETPGTSESATPESGPGTSTEPSEGSAPGTSTEPSEGSAPGTSTEPSEGSAPGTSTEPSEGSAPGTSTEPSEGSAPGTSTEPSEGSAPGSPAGSPTSTEEGTSTEPSEGSAPGTSESATPESGPGSEPATSGSETPGTSESATPESGPGSEPATSGSETPGTSESATPESGPGTSTEPSEGSAPGTSESATPESGPGSPAGSPTSTEEGSPAGSPTSTEEGSPAGSPTSTEEGTSESATPESGPGTSTEPSEGSAPGEESQKKLPSSRITCPQGSVAYGSYCYSLILIPQTWSNAELSCQMHFSGHLAFLLSTGEITFVSSLVKNSLTAYQYIWIGLHDPSHGTLPNGSGWKWSSSNVLTFYNWERNPSIAADRGYCAVLSQKSGFQKWRDFNCENELPYICKFKV

SEQ ID NO: 1013 - protein, 726 aa, Artificial Sequence
  Description of Artificial Sequence: Synthetic polypeptide
GSTSSTAESPGPGSTSSTAESPGPGSTSESPSGTAPGSTSSTAESPGPGSTSSTAESPGPGTSTPESGSASPGSTSESPSGTAPGTSPSGESSTAPGSTSESPSGTAPGSTSESPSGTAPGTSPSGESSTAPGSTSESPSGTAPGSTSESPSGTAPGTSPSGESSTAPGSTSESPSGTAPGSTSESPSGTAPGSTSESPSGTAPGTSTPESGSASPGSTSESPSGTAPGTSTPESGSASPGSTSSTAESPGPGSTSSTAESPGPGTSTPESGSASPGTSTPESGSASPGSTSESPSGTAPGTSTPESGSASPGTSTPESGSASPGSTSESPSGTAPGSTSESPSGTAPGSTSESPSGTAPGSTSSTAESPGPGTSTPESGSASPGTSTPESGSASPGSTSESPSGTAPGSTSESPSGTAPGTSTPESGSASPGSTSESPSGTAPGSTSESPSGTAPGTSTPESGSASPGTSPSGESSTAPGSTSSTAESPGPGTSPSGESSTAPGSTSSTAESPGPGTSTPESGSASPGSTSESPSGTAPGSTSSTAESPGPGTSTPESGSASPGTSTPESGSASPGEESQKKLPSSRITCPQGSVAYGSYCYSLILIPQTWSNAELSCQMHFSGHLAFLLSTGEITFVSSLVKNSLTAYQYIWIGLHDPSHGTLPNGSGWKWSSSNVLTFYNWERNPSIAADRGYCAVLSQKSGFQKWRDFNCENELPYICKFKV

SEQ ID NO: 1014 - protein, 986 aa, Artificial Sequence
  Description of Artificial Sequence: Synthetic polypeptide
GSSESGSSEGGPGSSESGSSEGGPGESPGGSSGSESGSGGEPSESGSSGESPGGSSGSESGESPGGSSGSESGSSESGSSEGGPGSSESGSSEGGPGSSESGSSEGGPGESPGGSSGSESGESPGGSSGSESGESPGGSSGSESGSSESGSSEGGPGSSESGSSEGGPGSSESGSSEGGPGSSESGSSEGGPGSSESGSSEGGPGSSESGSSEGGPGSGGEPSESGSSGESPGGSSGSESGESPGGSSGSESGSGGEPSESGSSGSEGSSGPGESSGSSESGSSEGGPGSGGEPSESGSSGSEGSSGPGESSGSSESGSSEGGPGSGGEPSESGSSGESPGGSSGSESGSGGEPSESGSSGSGGEPSESGSSGSSESGSSEGGPGSGGEPSESGSSGSGGEPSESGSSGSEGSSGPGESSGESPGGSSGSESGSEGSSGPGESSGSEGSSGPGESSGSGGEPSESGSSGSSESGSSEGGPGSSESGSSEGGPGESPGGSSGSESGSGGEPSESGSSGSEGSSGPGESSGESPGGSSGSESGSEGSSGPGSSESGSSEGGPGSGGEPSESGSSGSEGSSGPGESSGSEGSSGPGESSGSEGSSGPGESSGSGGEPSESGSSGSGGEPSESGSSGESPGGSSGSESGESPGGSSGSESGSGGEPSESGSSGSEGSSGPGESSGESPGGSSGSESGSSESGSSEGGPGSSESGSSEGGPGSSESGSSEGGPGSGGEPSESGSSGSSESGSSEGGPGESPGGSSGSESGSGGEPSESGSSGSSESGSSEGGPGESPGGSSGSESGSGGEPSESGSSGESPGGSSGSESGSGGEPSESGSSGEESQKKLPSSRITCPQGSVAYGSYCYSLILIPQTWSNAELSCQMHFSGHLAFLLSTGEITFVSSLVKNSLTAYQYIWIGLHDPSHGTLPNGSGWKWSSSNVLTFYNWERNPSIAADRGYCAVLSQKSGFQKWRDFNCENELPYICKFKV

SEQ ID NO: 1015 - protein, 1014 aa, Artificial Sequence
  Description of Artificial Sequence: Synthetic polypeptide
GSPAGSPTSTEEGTSESATPESGPGTSTEPSEGSAPGSPAGSPTSTEEGTSTEPSEGSAPGTSTEPSEGSAPGTSESATPESGPGSEPATSGSETPGSEPATSGSETPGSPAGSPTSTEEGTSESATPESGPGTSTEPSEGSAPGTSTEPSEGSAPGSPAGSPTSTEEGTSTEPSEGSAPGTSTEPSEGSAPGTSESATPESGPGTSTEPSEGSAPGTSESATPESGPGSEPATSGSETPGTSTEPSEGSAPGTSTEPSEGSAPGTSESATPESGPGTSESATPESGPGSPAGSPTSTEEGTSESATPESGPGSEPATSGSETPGTSESATPESGPGTSTEPSEGSAPGTSTEPSEGSAPGTSTEPSEGSAPGTSTEPSEGSAPGTSTEPSEGSAPGTSTEPSEGSAPGSPAGSPTSTEEGTSTEPSEGSAPGTSESATPESGPGSEPATSGSETPGTSESATPESGPGSEPATSGSETPGTSESATPESGPGTSTEPSEGSAPGTSESATPESGPGSPAGSPTSTEEGSPAGSPTSTEEGSPAGSPTSTEEGTSESATPESGPGTSTEPSEGSAPGTSESATPESGPGSEPATSGSETPGTSESATPESGPGSEPATSGSETPGTSESATPESGPGTSTEPSEGSAPGSPAGSPTSTEEGTSESATPESGPGSEPATSGSETPGTSESATPESGPGSPAGSPTSTEEGSPAGSPTSTEEGTSTEPSEGSAPGTSESATPESGPGTSESATPESGPGTSESATPESGPGSEPATSGSETPGSEPATSGSETPGSPAGSPTSTEEGTSTEPSEGSAPGTSTEPSEGSAPGSEPATSGSETPGTSESATPESGPGTSTEPSEGSAPGEESQKKLPSSRITCPQGSVAYGSYCYSLILIPQTWSNAELSCQMHFSGHLAFLLSTGEITFVSSLVKNSLTAYQYIWIGLHDPSHGTLPNGSGWKWSSSNVLTFYNWERNPSIAADRGYCAVLSQKSGFQKWRDFNCENELPYICKFKV

SEQ ID NO: 1016 - protein, 1025 aa, Artificial Sequence
  Description of Artificial Sequence: Synthetic polypeptide
  MOD_RES (430)..(432): Any amino acid
  MOD_RES (443)..(446): Any amino acid
GSTSESPSGTAPGTSPSGESSTAPGSTSESPSGTAPGSTSESPSGTAPGTSTPESGSASPGTSTPESGSASPGSTSESPSGTAPGSTSESPSGTAPGTSPSGESSTAPGSTSESPSGTAPGTSPSGESSTAPGTSPSGESSTAPGSTSSTAESPGPGTSPSGESSTAPGTSPSGESSTAPGSTSSTAESPGPGTSTPESGSASPGTSTPESGSASPGSTSESPSGTAPGSTSESPSGTAPGTSTPESGSASPGSTSSTAESPGPGTSTPESGSASPGSTSESPSGTAPGTSPSGESSTAPGSTSSTAESPGPGTSPSGESSTAPGTSTPESGSASPGSTSSTAESPGPGSTSSTAESPGPGSTSSTAESPGPGSTSSTAESPGPGTSPSGESSTAPGSTSESPSGTAPGSTSESPSGTAPGTSTPESGPXXXGASASGAPSTXXXXSESPSGTAPGSTSESPSGTAPGSTSESPSGTAPGSTSESPSGTAPGSTSESPSGTAPGSTSESPSGTAPGTSTPESGSASPGTSPSGESSTAPGTSPSGESSTAPGSTSSTAESPGPGTSPSGESSTAPGTSTPESGSASPGSTSESPSGTAPGSTSESPSGTAPGTSPSGESSTAPGSTSESPSGTAPGTSTPESGSASPGTSTPESGSASPGSTSESPSGTAPGTSTPESGSASPGSTSSTAESPGPGSTSESPSGTAPGSTSESPSGTAPGTSPSGESSTAPGSTSSTAESPGPGTSPSGESSTAPGTSTPESGSASPGTSPSGESSTAPGTSPSGESSTAPGTSPSGESSTAPGSTSSTAESPGPGSTSSTAESPGPGTSPSGESSTAPGSSPSASTGTGPGSSTPSGATGSPGSSTPSGATGSPGEESQKKLPSSRITCPQGSVAYGSYCYSLILIPQTWSNAELSCQMHFSGHLAFLLSTGEITFVSSLVKNSLTAYQYIWIGLHDPSHGTLPNGSGWKWSSSNVLTFYNWERNPSIAADRGYCAVLSQKSGFQKWRDFNCENELPYICKFKV

SEQ ID NO: 1017 - protein, 1014 aa, Artificial Sequence
  Description of Artificial Sequence: Synthetic polypeptide
GASPGTSSTGSPGSSPSASTGTGPGSSPSASTGTGPGTPGSGTASSSPGSSTPSGATGSPGSNPSASTGTGPGASPGTSSTGSPGTPGSGTASSSPGSSTPSGATGSPGTPGSGTASSSPGASPGTSSTGSPGASPGTSSTGSPGTPGSGTASSSPGSSTPSGATGSPGASPGTSSTGSPGTPGSGTASSSPGSSTPSGATGSPGSNPSASTGTGPGSSPSASTGTGPGSSTPSGATGSPGSSTPSGATGSPGASPGTSSTGSPGASPGTSSTGSPGASPGTSSTGSPGTPGSGTASSSPGASPGTSSTGSPGASPGTSSTGSPGASPGTSSTGSPGSSPSASTGTGPGTPGSGTASSSPGASPGTSSTGSPGASPGTSSTGSPGASPGTSSTGSPGSSTPSGATGSPGSSTPSGATGSPGASPGTSSTGSPGTPGSGTASSSPGSSTPSGATGSPGSSTPSGATGSPGSSTPSGATGSPGSSPSASTGTGPGASPGTSSTGSPGASPGTSSTGSPGTPGSGTASSSPGASPGTSSTGSPGASPGTSSTGSPGASPGTSSTGSPGASPGTSSTGSPGTPGSGTASSSPGSSTPSGATGSPGTPGSGTASSSPGSSTPSGATGSPGTPGSGTASSSPGSSTPSGATGSPGSSTPSGATGSPGSSPSASTGTGPGSSPSASTGTGPGASPGTSSTGSPGTPGSGTASSSPGSSTPSGATGSPGSSPSASTGTGPGSSPSASTGTGPGASPGTSSTGSPGASPGTSSTGSPGSSTPSGATGSPGSSPSASTGTGPGASPGTSSTGSPGSSPSASTGTGPGTPGSGTASSSPGSSTPSGATGSPGSSTPSGATGSPGASPGTSSTGSPGEESQKKLPSSRITCPQGSVAYGSYCYSLILIPQTWSNAELSCQMHFSGHLAFLLSTGEITFVSSLVKNSLTAYQYIWIGLHDPSHGTLPNGSGWKWSSSNVLTFYNWERNPSIAADRGYCAVLSQKSGFQKWRDFNCENELPYICKFKV

SEQ ID NO: 1018 - protein, 1025 aa, Artificial Sequence
  Description of Artificial Sequence: Synthetic polypeptide
GTSTEPSEGSAPGSEPATSGSETPGSPAGSPTSTEEGSTSSTAESPGPGTSTPESGSASPGSTSESPSGTAPGSTSESPSGTAPGTSTPESGSASPGTSTPESGSASPGSEPATSGSETPGTSESATPESGPGSPAGSPTSTEEGTSTEPSEGSAPGTSESATPESGPGTSTEPSEGSAPGTSTEPSEGSAPGSPAGSPTSTEEGTSTEPSEGSAPGTSTEPSEGSAPGTSESATPESGPGTSESATPESGPGTSTEPSEGSAPGTSTEPSEGSAPGTSESATPESGPGTSTEPSEGSAPGSEPATSGSETPGSPAGSPTSTEEGSSTPSGATGSPGTPGSGTASSSPGSSTPSGATGSPGTSTEPSEGSAPGTSTEPSEGSAPGSEPATSGSETPGSPAGSPTSTEEGSPAGSPTSTEEGTSTEPSEGSAPGASASGAPSTGGTSESATPESGPGSPAGSPTSTEEGSPAGSPTSTEEGSTSSTAESPGPGSTSESPSGTAPGTSPSGESSTAPGTPGSGTASSSPGSSTPSGATGSPGSSPSASTGTGPGSEPATSGSETPGTSESATPESGPGSEPATSGSETPGSTSSTAESPGPGSTSSTAESPGPGTSPSGESSTAPGSEPATSGSETPGSEPATSGSETPGTSTEPSEGSAPGSTSSTAESPGPGTSTPESGSASPGSTSESPSGTAPGTSTEPSEGSAPGTSTEPSEGSAPGTSTEPSEGSAPGSSTPSGATGSPGSSPSASTGTGPGASPGTSSTGSPGSEPATSGSETPGTSESATPESGPGSPAGSPTSTEEGSSTPSGATGSPGSSPSASTGTGPGASPGTSSTGSPGTSESATPESGPGTSTEPSEGSAPGTSTEPSEGSAPGEESQKKLPSSRITCPQGSVAYGSYCYSLILIPQTWSNAELSCQMHFSGHLAFLLSTGEITFVSSLVKNSLTAYQYIWIGLHDPSHGTLPNGSGWKWSSSNVLTFYNWERNPSIAADRGYCAVLSQKSGFQKWRDFNCENELPYICKFKV

SEQ ID NO: 1019 - protein, 1468 aa, Artificial Sequence
  Description of Artificial Sequence: Synthetic polypeptide
GTSTEPSEGSAPGSEPATSGSETPGSPAGSPTSTEEGSTSSTAESPGPGTSTPESGSASPGSTSESPSGTAPGSTSESPSGTAPGTSTPESGSASPGTSTPESGSASPGSEPATSGSETPGTSESATPESGPGSPAGSPTSTEEGTSTEPSEGSAPGTSESATPESGPGTSTEPSEGSAPGTSTEPSEGSAPGSPAGSPTSTEEGTSTEPSEGSAPGTSTEPSEGSAPGTSESATPESGPGTSESATPESGPGTSTEPSEGSAPGTSTEPSEGSAPGTSESATPESGPGTSTEPSEGSAPGSEPATSGSETPGSPAGSPTSTEEGSSTPSGATGSPGTPGSGTASSSPGSSTPSGATGSPGTSTEPSEGSAPGTSTEPSEGSAPGSEPATSGSETPGSPAGSPTSTEEGSPAGSPTSTEEGTSTEPSEGSAPGPEPTGPAPSGGSEPATSGSETPGTSESATPESGPGSPAGSPTSTEEGTSESATPESGPGSPAGSPTSTEEGSPAGSPTSTEEGTSESATPESGPGSPAGSPTSTEEGSPAGSPTSTEEGSTSSTAESPGPGSTSESPSGTAPGTSPSGESSTAPGSTSESPSGTAPGSTSESPSGTAPGTSPSGESSTAPGTSTEPSEGSAPGTSESATPESGPGTSESATPESGPGSEPATSGSETPGTSESATPESGPGTSESATPESGPGTSTEPSEGSAPGTSESATPESGPGTSTEPSEGSAPGTSPSGESSTAPGTSPSGESSTAPGTSPSGESSTAPGTSTEPSEGSAPGSPAGSPTSTEEGTSTEPSEGSAPGSSPSASTGTGPGSSTPSGATGSPGSSTPSGATGSPGSSTPSGATGSPGSSTPSGATGSPGASPGTSSTGSPGASASGAPSTGGTSPSGESSTAPGSTSSTAESPGPGTSPSGESSTAPGTSESATPESGPGTSTEPSEGSAPGTSTEPSEGSAPGSSPSASTGTGPGSSTPSGATGSPGASPGTSSTGSPGTSTPESGSASPGTSPSGESSTAPGTSPSGESSTAPGTSESATPESGPGSEPATSGSETPGTSTEPSEGSAPGSTSESPSGTAPGSTSESPSGTAPGTSTPESGSASPGSPAGSPTSTEEGTSESATPESGPGTSTEPSEGSAPGSPAGSPTSTEEGTSESATPESGPGSEPATSGSETPGSSTPSGATGSPGASPGTSSTGSPGSSTPSGATGSPGSTSESPSGTAPGTSPSGESSTAPGSTSSTAESPGPGSSTPSGATGSPGASPGTSSTGSPGTPGSGTASSSPGSPAGSPTSTEEGSPAGSPTSTEEGTSTEPSEGSAPGEESQKKLPSSRITCPQGSVAYGSYCYSLILIPQTWSNAELSCQMHFSGHLAFLLSTGEITFVSSLVKNSLTAYQYIWIGLHDPSHGTLPNGSGWKWSSSNVLTFYNWERNPSIAADRGYCAVLSQKSGFQKWRDFNCENELPYICKFKV

SEQ ID NO: 1020 - protein, 182 aa, Artificial Sequence
  Description of Artificial Sequence: Synthetic polypeptide
KCNTATCATNRLANFLVHSSNNFGPILPPTNVGSNTYGGSEPATSGSETPGTSESATPESGPGSEPATSGSETPGSPAGSPTSTEEGTSTEPSEGSAPGSEPATSGSETPGSEPATSGSETPGSEPATSGSETPGTSTEPSEGSAPGTSESATPESGPGSEPATSGSETPGTSTEPSEGSAP

SEQ ID NO: 1021 - protein, 182 aa, Artificial Sequence
  Description of Artificial Sequence: Synthetic polypeptide
KCNTATCATNRLANFLVHSSNNFGPILPPTNVGSNTYGGTSTPESGSASPGTSPSGESSTAPGTSPSGESSTAPGSTSSTAESPGPGSTSESPSGTAPGSTSSTAESPGPGTSPSGESSTAPGTSTPESGSASPGSTSSTAESPGPGTSPSGESSTAPGTSPSGESSTAPGTSPSGESSTAP

SEQ ID NO: 1022 - protein, 326 aa, Artificial Sequence
  Description of Artificial Sequence: Synthetic polypeptide
KCNTATCATNRLANFLVHSSNNFGPILPPTNVGSNTYGGTSESATPESGPGSEPATSGSETPGTSESATPESGPGSEPATSGSETPGTSESATPESGPGTSTEPSEGSAPGSPAGSPTSTEEGTSESATPESGPGSEPATSGSETPGTSESATPESGPGSPAGSPTSTEEGSPAGSPTSTEEGTSTEPSEGSAPGTSESATPESGPGTSESATPESGPGTSESATPESGPGSEPATSGSETPGSEPATSGSETPGSPAGSPTSTEEGTSTEPSEGSAPGTSTEPSEGSAPGSEPATSGSETPGTSESATPESGPGTSTEPSEGSAP

SEQ ID NO: 1023 - protein, 614 aa, Artificial Sequence
  Description of Artificial Sequence: Synthetic polypeptide
KCNTATCATNRLANFLVHSSNNFGPILPPTNVGSNTYGGSPAGSPTSTEEGTSESATPESGPGTSTEPSEGSAPGSPAGSPTSTEEGTSTEPSEGSAPGTSTEPSEGSAPGTSESATPESGPGSEPATSGSETPGSEPATSGSETPGSPAGSPTSTEEGTSESATPESGPGTSTEPSEGSAPGTSTEPSEGSAPGSPAGSPTSTEEGTSTEPSEGSAPGTSTEPSEGSAPGTSESATPESGPGTSTEPSEGSAPGTSESATPESGPGSEPATSGSETPGTSTEPSEGSAPGTSTEPSEGSAPGTSESATPESGPGTSESATPESGPGSPAGSPTSTEEGTSESATPESGPGSEPATSGSETPGTSESATPESGPGTSTEPSEGSAPGTSTEPSEGSAPGTSTEPSEGSAPGTSTEPSEGSAPGTSTEPSEGSAPGTSTEPSEGSAPGSPAGSPTSTEEGTSTEPSEGSAPGTSESATPESGPGSEPATSGSETPGTSESATPESGPGSEPATSGSETPGTSESATPESGPGTSTEPSEGSAPGTSESATPESGPGSPAGSPTSTEEGSPAGSPTSTEEGSPAGSPTSTEEGTSESATPESGPGTSTEPSEGSAP

SEQ ID NO: 1024 - protein, 614 aa, Artificial Sequence
  Description of Artificial Sequence: Synthetic polypeptide
KCNTATCATNRLANFLVHSSNNFGPILPPTNVGSNTYGGSTSSTAESPGPGSTSSTAESPGPGSTSESPSGTAPGSTSSTAESPGPGSTSSTAESPGPGTSTPESGSASPGSTSESPSGTAPGTSPSGESSTAPGSTSESPSGTAPGSTSESPSGTAPGTSPSGESSTAPGSTSESPSGTAPGSTSESPSGTAPGTSPSGESSTAPGSTSESPSGTAPGSTSESPSGTAPGSTSESPSGTAPGTSTPESGSASPGSTSESPSGTAPGTSTPESGSASPGSTSSTAESPGPGSTSSTAESPGPGTSTPESGSASPGTSTPESGSASPGSTSESPSGTAPGTSTPESGSASPGTSTPESGSASPGSTSESPSGTAPGSTSESPSGTAPGSTSESPSGTAPGSTSSTAESPGPGTSTPESGSASPGTSTPESGSASPGSTSESPSGTAPGSTSESPSGTAPGTSTPESGSASPGSTSESPSGTAPGSTSESPSGTAPGTSTPESGSASPGTSPSGESSTAPGSTSSTAESPGPGTSPSGESSTAPGSTSSTAESPGPGTSTPESGSASPGSTSESPSGTAPGSTSSTAESPGPGTSTPESGSASPGTSTPESGSASP

SEQ ID NO: 1025 - protein, 874 aa, Artificial Sequence
  Description of Artificial Sequence: Synthetic polypeptide
KCNTATCATNRLANFLVHSSNNFGPILPPTNVGSNTYGGSSESGSSEGGPGSSESGSSEGGPGESPGGSSGSESGSGGEPSESGSSGESPGGSSGSESGESPGGSSGSESGSSESGSSEGGPGSSESGSSEGGPGSSESGSSEGGPGESPGGSSGSESGESPGGSSGSESGESPGGSSGSESGSSESGSSEGGPGSSESGSSEGGPGSSESGSSEGGPGSSESGSSEGGPGSSESGSSEGGPGSSESGSSEGGPGSGGEPSESGSSGESPGGSSGSESGESPGGSSGSESGSGGEPSESGSSGSEGSSGPGESSGSSESGSSEGGPGSGGEPSESGSSGSEGSSGPGESSGSSESGSSEGGPGSGGEPSESGSSGESPGGSSGSESGSGGEPSESGSSGSGGEPSESGSSGSSESGSSEGGPGSGGEPSESGSSGSGGEPSESGSSGSEGSSGPGESSGESPGGSSGSESGSEGSSGPGESSGSEGSSGPGESSGSGGEPSESGSSGSSESGSSEGGPGSSESGSSEGGPGESPGGSSGSESGSGGEPSESGSSGSEGSSGPGESSGESPGGSSGSESGSEGSSGPGSSESGSSEGGPGSGGEPSESGSSGSEGSSGPGESSGSEGSSGPGESSGSEGSSGPGESSGSGGEPSESGSSGSGGEPSESGSSGESPGGSSGSESGESPGGSSGSESGSGGEPSESGSSGSEGSSGPGESSGESPGGSSGSESGSSESGSSEGGPGSSESGSSEGGPGSSESGSSEGGPGSGGEPSESGSSGSSESGSSEGGPGESPGGSSGSESGSGGEPSESGSSGSSESGSSEGGPGESPGGSSGSESGSGGEPSESGSSGESPGGSSGSESGSGGEPSESGSS

SEQ ID NO: 1026 - protein, 902 aa, Artificial Sequence
  Description of Artificial Sequence: Synthetic polypeptide
KCNTATCATNRLANFLVHSSNNFGPILPPTNVGSNTYGGSPAGSPTSTEEGTSESATPESGPGTSTEPSEGSAPGSPAGSPTSTEEGTSTEPSEGSAPGTSTEPSEGSAPGTSESATPESGPGSEPATSGSETPGSEPATSGSETPGSPAGSPTSTEEGTSESATPESGPGTSTEPSEGSAPGTSTEPSEGSAPGSPAGSPTSTEEGTSTEPSEGSAPGTSTEPSEGSAPGTSESATPESGPGTSTEPSEGSAPGTSESATPESGPGSEPATSGSETPGTSTEPSEGSAPGTSTEPSEGSAPGTSESATPESGPGTSESATPESGPGSPAGSPTSTEEGTSESATPESGPGSEPATSGSETPGTSESATPESGPGTSTEPSEGSAPGTSTEPSEGSAPGTSTEPSEGSAPGTSTEPSEGSAPGTSTEPSEGSAPGTSTEPSEGSAPGSPAGSPTSTEEGTSTEPSEGSAPGTSESATPESGPGSEPATSGSETPGTSESATPESGPGSEPATSGSETPGTSESATPESGPGTSTEPSEGSAPGTSESATPESGPGSPAGSPTSTEEGSPAGSPTSTEEGSPAGSPTSTEEGTSESATPESGPGTSTEPSEGSAPGTSESATPESGPGSEPATSGSETPGTSESATPESGPGSEPATSGSETPGTSESATPESGPGTSTEPSEGSAPGSPAGSPTSTEEGTSESATPESGPGSEPATSGSETPGTSESATPESGPGSPAGSPTSTEEGSPAGSPTSTEEGTSTEPSEGSAPGTSESATPESGPGTSESATPESGPGTSESATPESGPGSEPATSGSETPGSEPATSGSETPGSPAGSPTSTEEGTSTEPSEGSAPGTSTEPSEGSAPGSEPATSGSETPGTSESATPESGPGTSTEPSEGSAP

SEQ ID NO: 1027 - protein, 913 aa, Artificial Sequence
  Description of Artificial Sequence: Synthetic polypeptide
  MOD_RES (468)..(470): Any amino acid
  MOD_RES (481)..(484): Any amino acid
KCNTATCATNRLANFLVHSSNNFGPILPPTNVGSNTYGGSTSESPSGTAPGTSPSGESSTAPGSTSESPSGTAPGSTSESPSGTAPGTSTPESGSASPGTSTPESGSASPGSTSESPSGTAPGSTSESPSGTAPGTSPSGESSTAPGSTSESPSGTAPGTSPSGESSTAPGTSPSGESSTAPGSTSSTAESPGPGTSPSGESSTAPGTSPSGESSTAPGSTSSTAESPGPGTSTPESGSASPGTSTPESGSASPGSTSESPSGTAPGSTSESPSGTAPGTSTPESGSASPGSTSSTAESPGPGTSTPESGSASPGSTSESPSGTAPGTSPSGESSTAPGSTSSTAESPGPGTSPSGESSTAPGTSTPESGSASPGSTSSTAESPGPGSTSSTAESPGPGSTSSTAESPGPGSTSSTAESPGPGTSPSGESSTAPGSTSESPSGTAPGSTSESPSGTAPGTSTPESGPXXXGASASGAPSTXXXXSESPSGTAPGSTSESPSGTAPGSTSESPSGTAPGSTSESPSGTAPGSTSESPSGTAPGSTSESPSGTAPGTSTPESGSASPGTSPSGESSTAPGTSPSGESSTAPGSTSSTAESPGPGTSPSGESSTAPGTSTPESGSASPGSTSESPSGTAPGSTSESPSGTAPGTSPSGESSTAPGSTSESPSGTAPGTSTPESGSASPGTSTPESGSASPGSTSESPSGTAPGTSTPESGSASPGSTSSTAESPGPGSTSESPSGTAPGSTSESPSGTAPGTSPSGESSTAPGSTSSTAESPGPGTSPSGESSTAPGTSTPESGSASPGTSPSGESSTAPGTSPSGESSTAPGTSPSGESSTAPGSTSSTAESPGPGSTSSTAESPGPGTSPSGESSTAPGSSPSASTGTGPGSSTPSGATGSPGSSTPSGATGSP

SEQ ID NO: 1028 - protein, 902 aa, Artificial Sequence
  Description of Artificial Sequence: Synthetic polypeptide
KCNTATCATNRLANFLVHSSNNFGPILPPTNVGSNTYGGASPGTSSTGSPGSSPSASTGTGPGSSPSASTGTGPGTPGSGTASSSPGSSTPSGATGSPGSNPSASTGTGPGASPGTSSTGSPGTPGSGTASSSPGSSTPSGATGSPGTPGSGTASSSPGASPGTSSTGSPGASPGTSSTGSPGTPGSGTASSSPGSSTPSGATGSPGASPGTSSTGSPGTPGSGTASSSPGSSTPSGATGSPGSNPSASTGTGPGSSPSASTGTGPGSSTPSGATGSPGSSTPSGATGSPGASPGTSSTGSPGASPGTSSTGSPGASPGTSSTGSPGTPGSGTASSSPGASPGTSSTGSPGASPGTSSTGSPGASPGTSSTGSPGSSPSASTGTGPGTPGSGTASSSPGASPGTSSTGSPGASPGTSSTGSPGASPGTSSTGSPGSSTPSGATGSPGSSTPSGATGSPGASPGTSSTGSPGTPGSGTASSSPGSSTPSGATGSPGSSTPSGATGSPGSSTPSGATGSPGSSPSASTGTGPGASPGTSSTGSPGASPGTSSTGSPGTPGSGTASSSPGASPGTSSTGSPGASPGTSSTGSPGASPGTSSTGSPGASPGTSSTGSPGTPGSGTASSSPGSSTPSGATGSPGTPGSGTASSSPGSSTPSGATGSPGTPGSGTASSSPGSSTPSGATGSPGSSTPSGATGSPGSSPSASTGTGPGSSPSASTGTGPGASPGTSSTGSPGTPGSGTASSSPGSSTPSGATGSPGSSPSASTGTGPGSSPSASTGTGPGASPGTSSTGSPGASPGTSSTGSPGSSTPSGATGSPGSSPSASTGTGPGASPGTSSTGSPGSSPSASTGTGPGTPGSGTASSSPGSSTPSGATGSPGSSTPSGATGSPGASPGTSSTGSP

SEQ ID NO: 1029 - protein, 913 aa, Artificial Sequence
  Description of Artificial Sequence: Synthetic polypeptide
KCNTATCATNRLANFLVHSSNNFGPILPPTNVGSNTYGGTSTEPSEGSAPGSEPATSGSETPGSPAGSPTSTEEGSTSSTAESPGPGTSTPESGSASPGSTSESPSGTAPGSTSESPSGTAPGTSTPESGSASPGTSTPESGSASPGSEPATSGSETPGTSESATPESGPGSPAGSPTSTEEGTSTEPSEGSAPGTSESATPESGPGTSTEPSEGSAPGTSTEPSEGSAPGSPAGSPTSTEEGTSTEPSEGSAPGTSTEPSEGSAPGTSESATPESGPGTSESATPESGPGTSTEPSEGSAPGTSTEPSEGSAPGTSESATPESGPGTSTEPSEGSAPGSEPATSGSETPGSPAGSPTSTEEGSSTPSGATGSPGTPGSGTASSSPGSSTPSGATGSPGTSTEPSEGSAPGTSTEPSEGSAPGSEPATSGSETPGSPAGSPTSTEEGSPAGSPTSTEEGTSTEPSEGSAPGASASGAPSTGGTSESATPESGPGSPAGSPTSTEEGSPAGSPTSTEEGSTSSTAESPGPGSTSESPSGTAPGTSPSGESSTAPGTPGSGTASSSPGSSTPSGATGSPGSSPSASTGTGPGSEPATSGSETPGTSESATPESGPGSEPATSGSETPGSTSSTAESPGPGSTSSTAESPGPGTSPSGESSTAPGSEPATSGSETPGSEPATSGSETPGTSTEPSEGSAPGSTSSTAESPGPGTSTPESGSASPGSTSESPSGTAPGTSTEPSEGSAPGTSTEPSEGSAPGTSTEPSEGSAPGSSTPSGATGSPGSSPSASTGTGPGASPGTSSTGSPGSEPATSGSETPGTSESATPESGPGSPAGSPTSTEEGSSTPSGATGSPGSSPSASTGTGPGASPGTSSTGSPGTSESATPESGPGTSTEPSEGSAPGTSTEPSEGSAP

SEQ ID NO: 1030 - protein, 1356 aa, Artificial Sequence
  Description of Artificial Sequence: Synthetic polypeptide
KCNTATCATNRLANFLVHSSNNFGPILPPTNVGSNTYGGTSTEPSEGSAPGSEPATSGSETPGSPAGSPTSTEEGSTSSTAESPGPGTSTPESGSASPGSTSESPSGTAPGSTSESPSGTAPGTSTPESGSASPGTSTPESGSASPGSEPATSGSETPGTSESATPESGPGSPAGSPTSTEEGTSTEPSEGSAPGTSESATPESGPGTSTEPSEGSAPGTSTEPSEGSAPGSPAGSPTSTEEGTSTEPSEGSAPGTSTEPSEGSAPGTSESATPESGPGTSESATPESGPGTSTEPSEGSAPGTSTEPSEGSAPGTSESATPESGPGTSTEPSEGSAPGSEPATSGSETPGSPAGSPTSTEEGSSTPSGATGSPGTPGSGTASSSPGSSTPSGATGSPGTSTEPSEGSAPGTSTEPSEGSAPGSEPATSGSETPGSPAGSPTSTEEGSPAGSPTSTEEGTSTEPSEGSAPGPEPTGPAPSGGSEPATSGSETPGTSESATPESGPGSPAGSPTSTEEGTSESATPESGPGSPAGSPTSTEEGSPAGSPTSTEEGTSESATPESGPGSPAGSPTSTEEGSPAGSPTSTEEGSTSSTAESPGPGSTSESPSGTAPGTSPSGESSTAPGSTSESPSGTAPGSTSESPSGTAPGTSPSGESSTAPGTSTEPSEGSAPGTSESATPESGPGTSESATPESGPGSEPATSGSETPGTSESATPESGPGTSESATPESGPGTSTEPSEGSAPGTSESATPESGPGTSTEPSEGSAPGTSPSGESSTAPGTSPSGESSTAPGTSPSGESSTAPGTSTEPSEGSAPGSPAGSPTSTEEGTSTEPSEGSAPGSSPSASTGTGPGSSTPSGATGSPGSSTPSGATGSPGSSTPSGATGSPGSSTPSGATGSPGASPGTSSTGSPGASASGAPSTGGTSPSGESSTAPGSTSSTAESPGPGTSPSGESSTAPGTSESATPESGPGTSTEPSEGSAPGTSTEPSEGSAPGSSPSASTGTGPGSSTPSGATGSPGASPGTSSTGSPGTSTPESGSASPGTSPSGESSTAPGTSPSGESSTAPGTSESATPESGPGSEPATSGSETPGTSTEPSEGSAPGSTSESPSGTAPGSTSESPSGTAPGTSTPESGSASPGSPAGSPTSTEEGTSESATPESGPGTSTEPSEGSAPGSPAGSPTSTEEGTSESATPESGPGSEPATSGSETPGSSTPSGATGSPGASPGTSSTGSPGSSTPSGATGSPGSTSESPSGTAPGTSPSGESSTAPGSTSSTAESPGPGSSTPSGATGSPGASPGTSSTGSPGTPGSGTASSSPGSPAGSPTSTEEGSPAGSPTSTEEGTSTEPSEGSAP

SEQ ID NO: 1031 - protein, 951 aa, Artificial Sequence
  Description of Artificial Sequence: Synthetic polypeptide
MAEPAGSPTSTEEGTPGSGTASSSPGSSTPSGATGSPGASPGTSSTGSPGSPAGSPTSTEEGTSESATPESGPGTSTEPSEGSAPGSPAGSPTSTEEGTSTEPSEGSAPGTSTEPSEGSAPGTSESATPESGPGSEPATSGSETPGSEPATSGSETPGSPAGSPTSTEEGTSESATPESGPGTSTEPSEGSAPGTSTEPSEGSAPGSPAGSPTSTEEGTSTEPSEGSAPGTSTEPSEGSAPGTSESATPESGPGTSTEPSEGSAPGTSESATPESGPGSEPATSGSETPGTSTEPSEGSAPGTSTEPSEGSAPGTSESATPESGPGTSESATPESGPGSPAGSPTSTEEGTSESATPESGPGSEPATSGSETPGTSESATPESGPGTSTEPSEGSAPGTSTEPSEGSAPGTSTEPSEGSAPGTSTEPSEGSAPGTSTEPSEGSAPGTSTEPSEGSAPGSPAGSPTSTEEGTSTEPSEGSAPGTSESATPESGPGSEPATSGSETPGTSESATPESGPGSEPATSGSETPGTSESATPESGPGTSTEPSEGSAPGTSESATPESGPGSPAGSPTSTEEGSPAGSPTSTEEGSPAGSPTSTEEGTSESATPESGPGTSTEPSEGSAPGTSESATPESGPGSEPATSGSETPGTSESATPESGPGSEPATSGSETPGTSESATPESGPGTSTEPSEGSAPGSPAGSPTSTEEGTSESATPESGPGSEPATSGSETPGTSESATPESGPGSPAGSPTSTEEGSPAGSPTSTEEGTSTEPSEGSAPGTSESATPESGPGTSESATPESGPGTSESATPESGPGSEPATSGSETPGSEPATSGSETPGSPAGSPTSTEEGTSTEPSEGSAPGTSTEPSEGSAPGSEPATSGSETPGTSESATPESGPGTSTEPSEGSAPGKCNTATCATNRLANFLVHSSNNFGPILPPTNVGSNTY

SEQ ID NO: 1032 - protein, 962 aa, Artificial Sequence
  Description of Artificial Sequence: Synthetic polypeptide
MAEPAGSPTSTEEGASPGTSSTGSPGSSTPSGATGSPGSSTPSGATGSPGTSTEPSEGSAPGSEPATSGSETPGSPAGSPTSTEEGSTSSTAESPGPGTSTPESGSASPGSTSESPSGTAPGSTSESPSGTAPGTSTPESGSASPGTSTPESGSASPGSEPATSGSETPGTSESATPESGPGSPAGSPTSTEEGTSTEPSEGSAPGTSESATPESGPGTSTEPSEGSAPGTSTEPSEGSAPGSPAGSPTSTEEGTSTEPSEGSAPGTSTEPSEGSAPGTSESATPESGPGTSESATPESGPGTSTEPSEGSAPGTSTEPSEGSAPGTSESATPESGPGTSTEPSEGSAPGSEPATSGSETPGSPAGSPTSTEEGSSTPSGATGSPGTPGSGTASSSPGSSTPSGATGSPGTSTEPSEGSAPGTSTEPSEGSAPGSEPATSGSETPGSPAGSPTSTEEGSPAGSPTSTEEGTSTEPSEGSAPGASASGAPSTGGTSESATPESGPGSPAGSPTSTEEGSPAGSPTSTEEGSTSSTAESPGPGSTSESPSGTAPGTSPSGESSTAPGTPGSGTASSSPGSSTPSGATGSPGSSPSASTGTGPGSEPATSGSETPGTSESATPESGPGSEPATSGSETPGSTSSTAESPGPGSTSSTAESPGPGTSPSGESSTAPGSEPATSGSETPGSEPATSGSETPGTSTEPSEGSAPGSTSSTAESPGPGTSTPESGSASPGSTSESPSGTAPGTSTEPSEGSAPGTSTEPSEGSAPGTSTEPSEGSAPGSSTPSGATGSPGSSPSASTGTGPGASPGTSSTGSPGSEPATSGSETPGTSESATPESGPGSPAGSPTSTEEGSSTPSGATGSPGSSPSASTGTGPGASPGTSSTGSPGTSESATPESGPGTSTEPSEGSAPGTSTEPSEGSAPGKCNTATCATNRLANFLVHSSNNFGPILPPTNVGSNTY

SEQ ID NO: 1033 - protein, 182 aa, Artificial Sequence
  Description of Artificial Sequence: Synthetic polypeptide
GSEPATSGSETPGTSESATPESGPGSEPATSGSETPGSPAGSPTSTEEGTSTEPSEGSAPGSEPATSGSETPGSEPATSGSETPGSEPATSGSETPGTSTEPSEGSAPGTSESATPESGPGSEPATSGSETPGTSTEPSEGSAPGKCNTATCATNRLANFLVHSSNNFGPILPPTNVGSNTY

SEQ ID NO: 1034 - protein, 182 aa, Artificial Sequence
  Description of Artificial Sequence: Synthetic polypeptide
GTSTPESGSASPGTSPSGESSTAPGTSPSGESSTAPGSTSSTAESPGPGSTSESPSGTAPGSTSSTAESPGPGTSPSGESSTAPGTSTPESGSASPGSTSSTAESPGPGTSPSGESSTAPGTSPSGESSTAPGTSPSGESSTAPGKCNTATCATNRLANFLVHSSNNFGPILPPTNVGSNTY

SEQ ID NO: 1035 - protein, 326 aa, Artificial Sequence
  Description of Artificial Sequence: Synthetic polypeptide
GTSESATPESGPGSEPATSGSETPGTSESATPESGPGSEPATSGSETPGTSESATPESGPGTSTEPSEGSAPGSPAGSPTSTEEGTSESATPESGPGSEPATSGSETPGTSESATPESGPGSPAGSPTSTEEGSPAGSPTSTEEGTSTEPSEGSAPGTSESATPESGPGTSESATPESGPGTSESATPESGPGSEPATSGSETPGSEPATSGSETPGSPAGSPTSTEEGTSTEPSEGSAPGTSTEPSEGSAPGSEPATSGSETPGTSESATPESGPGTSTEPSEGSAPGKCNTATCATNRLANFLVHSSNNFGPILPPTNVGSNTY

SEQ ID NO: 1036 - protein, 614 aa, Artificial Sequence
  Description of Artificial Sequence: Synthetic polypeptide
GSPAGSPTSTEEGTSESATPESGPGTSTEPSEGSAPGSPAGSPTSTEEGTSTEPSEGSAPGTSTEPSEGSAPGTSESATPESGPGSEPATSGSETPGSEPATSGSETPGSPAGSPTSTEEGTSESATPESGPGTSTEPSEGSAPGTSTEPSEGSAPGSPAGSPTSTEEGTSTEPSEGSAPGTSTEPSEGSAPGTSESATPESGPGTSTEPSEGSAPGTSESATPESGPGSEPATSGSETPGTSTEPSEGSAPGTSTEPSEGSAPGTSESATPESGPGTSESATPESGPGSPAGSPTSTEEGTSESATPESGPGSEPATSGSETPGTSESATPESGPGTSTEPSEGSAPGTSTEPSEGSAPGTSTEPSEGSAPGTSTEPSEGSAPGTSTEPSEGSAPGTSTEPSEGSAPGSPAGSPTSTEEGTSTEPSEGSAPGTSESATPESGPGSEPATSGSETPGTSESATPESGPGSEPATSGSETPGTSESATPESGPGTSTEPSEGSAPGTSESATPESGPGSPAGSPTSTEEGSPAGSPTSTEEGSPAGSPTSTEEGTSESATPESGPGTSTEPSEGSAPGKCNTATCATNRLANFLVHSSNNFGPILPPTNVGSNTY

SEQ ID NO: 1037 - protein, 614 aa, Artificial Sequence
  Description of Artificial Sequence: Synthetic polypeptide
GSTSSTAESPGPGSTSSTAESPGPGSTSESPSGTAPGSTSSTAESPGPGSTSSTAESPGPGTSTPESGSASPGSTSESPSGTAPGTSPSGESSTAPGSTSESPSGTAPGSTSESPSGTAPGTSPSGESSTAPGSTSESPSGTAPGSTSESPSGTAPGTSPSGESSTAPGSTSESPSGTAPGSTSESPSGTAPGSTSESPSGTAPGTSTPESGSASPGSTSESPSGTAPGTSTPESGSASPGSTSSTAESPGPGSTSSTAESPGPGTSTPESGSASPGTSTPESGSASPGSTSESPSGTAPGTSTPESGSASPGTSTPESGSASPGSTSESPSGTAPGSTSESPSGTAPGSTSESPSGTAPGSTSSTAESPGPGTSTPESGSASPGTSTPESGSASPGSTSESPSGTAPGSTSESPSGTAPGTSTPESGSASPGSTSESPSGTAPGSTSESPSGTAPGTSTPESGSASPGTSPSGESSTAPGSTSSTAESPGPGTSPSGESSTAPGSTSSTAESPGPGTSTPESGSASPGSTSESPSGTAPGSTSSTAESPGPGTSTPESGSASPGTSTPESGSASPGKCNTATCATNRLANFLVHSSNNFGPILPPTNVGSNTY

SEQ ID NO: 1038 - protein, 874 aa, Artificial Sequence
  Description of Artificial Sequence: Synthetic polypeptide
GSSESGSSEGGPGSSESGSSEGGPGESPGGSSGSESGSGGEPSESGSSGESPGGSSGSESGESPGGSSGSESGSSESGSSEGGPGSSESGSSEGGPGSSESGSSEGGPGESPGGSSGSESGESPGGSSGSESGESPGGSSGSESGSSESGSSEGGPGSSESGSSEGGPGSSESGSSEGGPGSSESGSSEGGPGSSESGSSEGGPGSSESGSSEGGPGSGGEPSESGSSGESPGGSSGSESGESPGGSSGSESGSGGEPSESGSSGSEGSSGPGESSGSSESGSSEGGPGSGGEPSESGSSGSEGSSGPGESSGSSESGSSEGGPGSGGEPSESGSSGESPGGSSGSESGSGGEPSESGSSGSGGEPSESGSSGSSESGSSEGGPGSGGEPSESGSSGSGGEPSESGSSGSEGSSGPGESSGESPGGSSGSESGSEGSSGPGESSGSEGSSGPGESSGSGGEPSESGSSGSSESGSSEGGPGSSESGSSEGGPGESPGGSSGSESGSGGEPSESGSSGSEGSSGPGESSGESPGGSSGSESGSEGSSGPGSSESGSSEGGPGSGGEPSESGSSGSEGSSGPGESSGSEGSSGPGESSGSEGSSGPGESSGSGGEPSESGSSGSGGEPSESGSSGESPGGSSGSESGESPGGSSGSESGSGGEPSESGSSGSEGSSGPGESSGESPGGSSGSESGSSESGSSEGGPGSSESGSSEGGPGSSESGSSEGGPGSGGEPSESGSSGSSESGSSEGGPGESPGGSSGSESGSGGEPSESGSSGSSESGSSEGGPGESPGGSSGSESGSGGEPSESGSSGESPGGSSGSESGSGGEPSESGSSGKCNTATCATNRLANFLVHSSNNFGPILPPTNVGSNTY

SEQ ID NO: 1039 - protein, 902 aa, Artificial Sequence
  Description of Artificial Sequence: Synthetic polypeptide
GSPAGSPTSTEEGTSESATPESGPGTSTEPSEGSAPGSPAGSPTSTEEGTSTEPSEGSAPGTSTEPSEGSAPGTSESATPESGPGSEPATSGSETPGSEPATSGSETPGSPAGSPTSTEEGTSESATPESGPGTSTEPSEGSAPGTSTEPSEGSAPGSPAGSPTSTEEGTSTEPSEGSAPGTSTEPSEGSAPGTSESATPESGPGTSTEPSEGSAPGTSESATPESGPGSEPATSGSETPGTSTEPSEGSAPGTSTEPSEGSAPGTSESATPESGPGTSESATPESGPGSPAGSPTSTEEGTSESATPESGPGSEPATSGSETPGTSESATPESGPGTSTEPSEGSAPGTSTEPSEGSAPGTSTEPSEGSAPGTSTEPSEGSAPGTSTEPSEGSAPGTSTEPSEGSAPGSPAGSPTSTEEGTSTEPSEGSAPGTSESATPESGPGSEPATSGSETPGTSESATPESGPGSEPATSGSETPGTSESATPESGPGTSTEPSEGSAPGTSESATPESGPGSPAGSPTSTEEGSPAGSPTSTEEGSPAGSPTSTEEGTSESATPESGPGTSTEPSEGSAPGTSESATPESGPGSEPATSGSETPGTSESATPESGPGSEPATSGSETPGTSESATPESGPGTSTEPSEGSAPGSPAGSPTSTEEGTSESATPESGPGSEPATSGSETPGTSESATPESGPGSPAGSPTSTEEGSPAGSPTSTEEGTSTEPSEGSAPGTSESATPESGPGTSESATPESGPGTSESATPESGPGSEPATSGSETPGSEPATSGSETPGSPAGSPTSTEEGTSTEPSEGSAPGTSTEPSEGSAPGSEPATSGSETPGTSESATPESGPGTSTEPSEGSAPGKCNTATCATNRLANFLVHSSNNFGPILPPTNVGSNTY

SEQ ID NO: 1040 - protein, 913 aa, Artificial Sequence
  Description of Artificial Sequence: Synthetic polypeptide
  MOD_RES (430)..(432): Any amino acid
  MOD_RES (443)..(446): Any amino acid
GSTSESPSGTAPGTSPSGESSTAPGSTSESPSGTAPGSTSESPSGTAPGTSTPESGSASPGTSTPESGSASPGSTSESPSGTAPGSTSESPSGTAPGTSPSGESSTAPGSTSESPSGTAPGTSPSGESSTAPGTSPSGESSTAPGSTSSTAESPGPGTSPSGESSTAPGTSPSGESSTAPGSTSSTAESPGPGTSTPESGSASPGTSTPESGSASPGSTSESPSGTAPGSTSESPSGTAPGTSTPESGSASPGSTSSTAESPGPGTSTPESGSASPGSTSESPSGTAPGTSPSGESSTAPGSTSSTAESPGPGTSPSGESSTAPGTSTPESGSASPGSTSSTAESPGPGSTSSTAESPGPGSTSSTAESPGPGSTSSTAESPGPGTSPSGESSTAPGSTSESPSGTAPGSTSESPSGTAPGTSTPESGPXXXGASASGAPSTXXXXSESPSGTAPGSTSESPSGTAPGSTSESPSGTAPGSTSESPSGTAPGSTSESPSGTAPGSTSESPSGTAPGTSTPESGSASPGTSPSGESSTAPGTSPSGESSTAPGSTSSTAESPGPGTSPSGESSTAPGTSTPESGSASPGSTSESPSGTAPGSTSESPSGTAPGTSPSGESSTAPGSTSESPSGTAPGTSTPESGSASPGTSTPESGSASPGSTSESPSGTAPGTSTPESGSASPGSTSSTAESPGPGSTSESPSGTAPGSTSESPSGTAPGTSPSGESSTAPGSTSSTAESPGPGTSPSGESSTAPGTSTPESGSASPGTSPSGESSTAPGTSPSGESSTAPGTSPSGESSTAPGSTSSTAESPGPGSTSSTAESPGPGTSPSGESSTAPGSSPSASTGTGPGSSTPSGATGSPGSSTPSGATGSPGKCNTATCATNRLANFLVHSSNNFGPILPPTNVGSNTY

SEQ ID NO: 1041 - protein, 902 aa, Artificial Sequence
  Description of Artificial Sequence: Synthetic polypeptide
GASPGTSSTGSPGSSPSASTGTGPGSSPSASTGTGPGTPGSGTASSSPGSSTPSGATGSPGSNPSASTGTGPGASPGTSSTGSPGTPGSGTASSSPGSSTPSGATGSPGTPGSGTASSSPGASPGTSSTGSPGASPGTSSTGSPGTPGSGTASSSPGSSTPSGATGSPGASPGTSSTGSPGTPGSGTASSSPGSSTPSGATGSPGSNPSASTGTGPGSSPSASTGTGPGSSTPSGATGSPGSSTPSGATGSPGASPGTSSTGSPGASPGTSSTGSPGASPGTSSTGSPGTPGSGTASSSPGASPGTSSTGSPGASPGTSSTGSPGASPGTSSTGSPGSSPSASTGTGPGTPGSGTASSSPGASPGTSSTGSPGASPGTSSTGSPGASPGTSSTGSPGSSTPSGATGSPGSSTPSGATGSPGASPGTSSTGSPGTPGSGTASSSPGSSTPSGATGSPGSSTPSGATGSPGSSTPSGATGSPGSSPSASTGTGPGASPGTSSTGSPGASPGTSSTGSPGTPGSGTASSSPGASPGTSSTGSPGASPGTSSTGSPGASPGTSSTGSPGASPGTSSTGSPGTPGSGTASSSPGSSTPSGATGSPGTPGSGTASSSPGSSTPSGATGSPGTPGSGTASSSPGSSTPSGATGSPGSSTPSGATGSPGSSPSASTGTGPGSSPSASTGTGPGASPGTSSTGSPGTPGSGTASSSPGSSTPSGATGSPGSSPSASTGTGPGSSPSASTGTGPGASPGTSSTGSPGASPGTSSTGSPGSSTPSGATGSPGSSPSASTGTGPGASPGTSSTGSPGSSPSASTGTGPGTPGSGTASSSPGSSTPSGATGSPGSSTPSGATGSPGASPGTSSTGSPGKCNTATCATNRLANFLVHSSNNFGPILPPTNVGSNTY

SEQ ID NO: 1042 - protein, 913 aa, Artificial Sequence
  Description of Artificial Sequence: Synthetic polypeptide
GTSTEPSEGSAPGSEPATSGSETPGSPAGSPTSTEEGSTSSTAESPGPGTSTPESGSASPGSTSESPSGTAPGSTSESPSGTAPGTSTPESGSASPGTSTPESGSASPGSEPATSGSETPGTSESATPESGPGSPAGSPTSTEEGTSTEPSEGSAPGTSESATPESGPGTSTEPSEGSAPGTSTEPSEGSAPGSPAGSPTSTEEGTSTEPSEGSAPGTSTEPSEGSAPGTSESATPESGPGTSESATPESGPGTSTEPSEGSAPGTSTEPSEGSAPGTSESATPESGPGTSTEPSEGSAPGSEPATSGSETPGSPAGSPTSTEEGSSTPSGATGSPGTPGSGTASSSPGSSTPSGATGSPGTSTEPSEGSAPGTSTEPSEGSAPGSEPATSGSETPGSPAGSPTSTEEGSPAGSPTSTEEGTSTEPSEGSAPGASASGAPSTGGTSESATPESGPGSPAGSPTSTEEGSPAGSPTSTEEGSTSSTAESPGPGSTSESPSGTAPGTSPSGESSTAPGTPGSGTASSSPGSSTPSGATGSPGSSPSASTGTGPGSEPATSGSETPGTSESATPESGPGSEPATSGSETPGSTSSTAESPGPGSTSSTAESPGPGTSPSGESSTAPGSEPATSGSETPGSEPATSGSETPGTSTEPSEGSAPGSTSSTAESPGPGTSTPESGSASPGSTSESPSGTAPGTSTEPSEGSAPGTSTEPSEGSAPGTSTEPSEGSAPGSSTPSGATGSPGSSPSASTGTGPGASPGTSSTGSPGSEPATSGSETPGTSESATPESGPGSPAGSPTSTEEGSSTPSGATGSPGSSPSASTGTGPGASPGTSSTGSPGTSESATPESGPGTSTEPSEGSAPGTSTEPSEGSAPGKCNTATCATNRLANFLVHSSNNFGPILPPTNVGSNTY

SEQ ID NO: 1043 - protein, 1356 aa, Artificial Sequence
  Description of Artificial Sequence: Synthetic polypeptide
GTSTEPSEGSAPGSEPATSGSETPGSPAGSPTSTEEGSTSSTAESPGPGTSTPESGSASPGSTSESPSGTAPGSTSESPSGTAPGTSTPESGSASPGTSTPESGSASPGSEPATSGSETPGTSESATPESGPGSPAGSPTSTEEGTSTEPSEGSAPGTSESATPESGPGTSTEPSEGSAPGTSTEPSEGSAPGSPAGSPTSTEEGTSTEPSEGSAPGTSTEPSEGSAPGTSESATPESGPGTSESATPESGPGTSTEPSEGSAPGTSTEPSEGSAPGTSESATPESGPGTSTEPSEGSAPGSEPATSGSETPGSPAGSPTSTEEGSSTPSGATGSPGTPGSGTASSSPGSSTPSGATGSPGTSTEPSEGSAPGTSTEPSEGSAPGSEPATSGSETPGSPAGSPTSTEEGSPAGSPTSTEEGTSTEPSEGSAPGPEPTGPAPSGGSEPATSGSETPGTSESATPESGPGSPAGSPTSTEEGTSESATPESGPGSPAGSPTSTEEGSPAGSPTSTEEGTSESATPESGPGSPAGSPTSTEEGSPAGSPTSTEEGSTSSTAESPGPGSTSESPSGTAPGTSPSGESSTAPGSTSESPSGTAPGSTSESPSGTAPGTSPSGESSTAPGTSTEPSEGSAPGTSESATPESGPGTSESATPESGPGSEPATSGSETPGTSESATPESGPGTSESATPESGPGTSTEPSEGSAPGTSESATPESGPGTSTEPSEGSAPGTSPSGESSTAPGTSPSGESSTAPGTSPSGESSTAPGTSTEPSEGSAPGSPAGSPTSTEEGTSTEPSEGSAPGSSPSASTGTGPGSSTPSGATGSPGSSTPSGATGSPGSSTPSGATGSPGSSTPSGATGSPGASPGTSSTGSPGASASGAPSTGGTSPSGESSTAPGSTSSTAESPGPGTSPSGESSTAPGTSESATPESGPGTSTEPSEGSAPGTSTEPSEGSAPGSSPSASTGTGPGSSTPSGATGSPGASPGTSSTGSPGTSTPESGSASPGTSPSGESSTAPGTSPSGESSTAPGTSESATPESGPGSEPATSGSETPGTSTEPSEGSAPGSTSESPSGTAPGSTSESPSGTAPGTSTPESGSASPGSPAGSPTSTEEGTSESATPESGPGTSTEPSEGSAPGSPAGSPTSTEEGTSESATPESGPGSEPATSGSETPGSSTPSGATGSPGASPGTSSTGSPGSSTPSGATGSPGSTSESPSGTAPGTSPSGESSTAPGSTSSTAESPGPGSSTPSGATGSPGASPGTSSTGSPGTPGSGTASSSPGSPAGSPTSTEEGSPAGSPTSTEEGTSTEPSEGSAPGKCNTATCATNRLANFLVHSSNNFGPILPPTNVGSNTY

SEQ ID NO: 1044 - protein, 173 aa, Artificial Sequence
  Description of Artificial Sequence: Synthetic polypeptide
SLRRSSCFGGRMDRIGAQSGLGCNSFRYGGSEPATSGSETPGTSESATPESGPGSEPATSGSETPGSPAGSPTSTEEGTSTEPSEGSAPGSEPATSGSETPGSEPATSGSETPGSEPATSGSETPGTSTEPSEGSAPGTSESATPESGPGSEPATSGSETPGTSTEPSEGSAP

SEQ ID NO: 1045 - protein, 173 aa, Artificial Sequence
  Description of Artificial Sequence: Synthetic polypeptide
SLRRSSCFGGRMDRIGAQSGLGCNSFRYGGTSTPESGSASPGTSPSGESSTAPGTSPSGESSTAPGSTSSTAESPGPGSTSESPSGTAPGSTSSTAESPGPGTSPSGESSTAPGTSTPESGSASPGSTSSTAESPGPGTSPSGESSTAPGTSPSGESSTAPGTSPSGESSTAP

SEQ ID NO: 1046 - protein, 317 aa, Artificial Sequence
  Description of Artificial Sequence: Synthetic polypeptide
SLRRSSCFGGRMDRIGAQSGLGCNSFRYGGTSESATPESGPGSEPATSGSETPGTSESATPESGPGSEPATSGSETPGTSESATPESGPGTSTEPSEGSAPGSPAGSPTSTEEGTSESATPESGPGSEPATSGSETPGTSESATPESGPGSPAGSPTSTEEGSPAGSPTSTEEGTSTEPSEGSAPGTSESATPESGPGTSESATPESGPGTSESATPESGPGSEPATSGSETPGSEPATSGSETPGSPAGSPTSTEEGTSTEPSEGSAPGTSTEPSEGSAPGSEPATSGSETPGTSESATPESGPGTSTEPSEGSAP

SEQ ID NO: 1047 - protein, 605 aa, Artificial Sequence
  Description of Artificial Sequence: Synthetic polypeptide
SLRRSSCFGGRMDRIGAQSGLGCNSFRYGGSPAGSPTSTEEGTSESATPESGPGTSTEPSEGSAPGSPAGSPTSTEEGTSTEPSEGSAPGTSTEPSEGSAPGTSESATPESGPGSEPATSGSETPGSEPATSGSETPGSPAGSPTSTEEGTSESATPESGPGTSTEPSEGSAPGTSTEPSEGSAPGSPAGSPTSTEEGTSTEPSEGSAPGTSTEPSEGSAPGTSESATPESGPGTSTEPSEGSAPGTSESATPESGPGSEPATSGSETPGTSTEPSEGSAPGTSTEPSEGSAPGTSESATPESGPGTSESATPESGPGSPAGSPTSTEEGTSESATPESGPGSEPATSGSETPGTSESATPESGPGTSTEPSEGSAPGTSTEPSEGSAPGTSTEPSEGSAPGTSTEPSEGSAPGTSTEPSEGSAPGTSTEPSEGSAPGSPAGSPTSTEEGTSTEPSEGSAPGTSESATPESGPGSEPATSGSETPGTSESATPESGPGSEPATSGSETPGTSESATPESGPGTSTEPSEGSAPGTSESATPESGPGSPAGSPTSTEEGSPAGSPTSTEEGSPAGSPTSTEEGTSESATPESGPGTSTEPSEGSAP

SEQ ID NO: 1048 - protein, 605 aa, Artificial Sequence
  Description of Artificial Sequence: Synthetic polypeptide
SLRRSSCFGGRMDRIGAQSGLGCNSFRYGGSTSSTAESPGPGSTSSTAESPGPGSTSESPSGTAPGSTSSTAESPGPGSTSSTAESPGPGTSTPESGSASPGSTSESPSGTAPGTSPSGESSTAPGSTSESPSGTAPGSTSESPSGTAPGTSPSGESSTAPGSTSESPSGTAPGSTSESPSGTAPGTSPSGESSTAPGSTSESPSGTAPGSTSESPSGTAPGSTSESPSGTAPGTSTPESGSASPGSTSESPSGTAPGTSTPESGSASPGSTSSTAESPGPGSTSSTAESPGPGTSTPESGSASPGTSTPESGSASPGSTSESPSGTAPGTSTPESGSASPGTSTPESGSASPGSTSESPSGTAPGSTSESPSGTAPGSTSESPSGTAPGSTSSTAESPGPGTSTPESGSASPGTSTPESGSASPGSTSESPSGTAPGSTSESPSGTAPGTSTPESGSASPGSTSESPSGTAPGSTSESPSGTAPGTSTPESGSASPGTSPSGESSTAPGSTSSTAESPGPGTSPSGESSTAPGSTSSTAESPGPGTSTPESGSASPGSTSESPSGTAPGSTSSTAESPGPGTSTPESGSASPGTSTPESGSASP

SEQ ID NO: 1049 - protein, 865 aa, Artificial Sequence
  Description of Artificial Sequence: Synthetic polypeptide
SLRRSSCFGGRMDRIGAQSGLGCNSFRYGGSSESGSSEGGPGSSESGSSEGGPGESPGGSSGSESGSGGEPSESGSSGESPGGSSGSESGESPGGSSGSESGSSESGSSEGGPGSSESGSSEGGPGSSESGSSEGGPGESPGGSSGSESGESPGGSSGSESGESPGGSSGSESGSSESGSSEGGPGSSESGSSEGGPGSSESGSSEGGPGSSESGSSEGGPGSSESGSSEGGPGSSESGSSEGGPGSGGEPSESGSSGESPGGSSGSESGESPGGSSGSESGSGGEPSESGSSGSEGSSGPGESSGSSESGSSEGGPGSGGEPSESGSSGSEGSSGPGESSGSSESGSSEGGPGSGGEPSESGSSGESPGGSSGSESGSGGEPSESGSSGSGGEPSESGSSGSSESGSSEGGPGSGGEPSESGSSGSGGEPSESGSSGSEGSSGPGESSGESPGGSSGSESGSEGSSGPGESSGSEGSSGPGESSGSGGEPSESGSSGSSESGSSEGGPGSSESGSSEGGPGESPGGSSGSESGSGGEPSESGSSGSEGSSGPGESSGESPGGSSGSESGSEGSSGPGSSESGSSEGGPGSGGEPSESGSSGSEGSSGPGESSGSEGSSGPGESSGSEGSSGPGESSGSGGEPSESGSSGSGGEPSESGSSGESPGGSSGSESGESPGGSSGSESGSGGEPSESGSSGSEGSSGPGESSGESPGGSSGSESGSSESGSSEGGPGSSESGSSEGGPGSSESGSSEGGPGSGGEPSESGSSGSSESGSSEGGPGESPGGSSGSESGSGGEPSESGSSGSSESGSSEGGPGESPGGSSGSESGSGGEPSESGSSGESPGGSSGSESGSGGEPSESGSS

SEQ ID NO: 1050 - protein, 893 aa, Artificial Sequence
  Description of Artificial Sequence: Synthetic polypeptide
SLRRSSCFGGRMDRIGAQSGLGCNSFRYGGSPAGSPTSTEEGTSESATPESGPGTSTEPSEGSAPGSPAGSPTSTEEGTSTEPSEGSAPGTSTEPSEGSAPGTSESATPESGPGSEPATSGSETPGSEPATSGSETPGSPAGSPTSTEEGTSESATPESGPGTSTEPSEGSAPGTSTEPSEGSAPGSPAGSPTSTEEGTSTEPSEGSAPGTSTEPSEGSAPGTSESATPESGPGTSTEPSEGSAPGTSESATPESGPGSEPATSGSETPGTSTEPSEGSAPGTSTEPSEGSAPGTSESATPESGPGTSESATPESGPGSPAGSPTSTEEGTSESATPESGPGSEPATSGSETPGTSESATPESGPGTSTEPSEGSAPGTSTEPSEGSAPGTSTEPSEGSAPGTSTEPSEGSAPGTSTEPSEGSAPGTSTEPSEGSAPGSPAGSPTSTEEGTSTEPSEGSAPGTSESATPESGPGSEPATSGSETPGTSESATPESGPGSEPATSGSETPGTSESATPESGPGTSTEPSEGSAPGTSESATPESGPGSPAGSPTSTEEGSPAGSPTSTEEGSPAGSPTSTEEGTSESATPESGPGTSTEPSEGSAPGTSESATPESGPGSEPATSGSETPGTSESATPESGPGSEPATSGSETPGTSESATPESGPGTSTEPSEGSAPGSPAGSPTSTEEGTSESATPESGPGSEPATSGSETPGTSESATPESGPGSPAGSPTSTEEGSPAGSPTSTEEGTSTEPSEGSAPGTSESATPESGPGTSESATPESGPGTSESATPESGPGSEPATSGSETPGSEPATSGSETPGSPAGSPTSTEEGTSTEPSEGSAPGTSTEPSEGSAPGSEPATSGSETPGTSESATPESGPGTSTEPSEGSAP

SEQ ID NO: 1051 - protein, 904 aa, Artificial Sequence
  Description of Artificial Sequence: Synthetic polypeptide
  MOD_RES (459)..(461): Any amino acid
  MOD_RES (472)..(475): Any amino acid
SLRRSSCFGGRMDRIGAQSGLGCNSFRYGGSTSESPSGTAPGTSPSGESSTAPGSTSESPSGTAPGSTSESPSGTAPGTSTPESGSASPGTSTPESGSASPGSTSESPSGTAPGSTSESPSGTAPGTSPSGESSTAPGSTSESPSGTAPGTSPSGESSTAPGTSPSGESSTAPGSTSSTAESPGPGTSPSGESSTAPGTSPSGESSTAPGSTSSTAESPGPGTSTPESGSASPGTSTPESGSASPGSTSESPSGTAPGSTSESPSGTAPGTSTPESGSASPGSTSSTAESPGPGTSTPESGSASPGSTSESPSGTAPGTSPSGESSTAPGSTSSTAESPGPGTSPSGESSTAPGTSTPESGSASPGSTSSTAESPGPGSTSSTAESPGPGSTSSTAESPGPGSTSSTAESPGPGTSPSGESSTAPGSTSESPSGTAPGSTSESPSGTAPGTSTPESGPXXXGASASGAPSTXXXXSESPSGTAPGSTSESPSGTAPGSTSESPSGTAPGSTSESPSGTAPGSTSESPSGTAPGSTSESPSGTAPGTSTPESGSASPGTSPSGESSTAPGTSPSGESSTAPGSTSSTAESPGPGTSPSGESSTAPGTSTPESGSASPGSTSESPSGTAPGSTSESPSGTAPGTSPSGESSTAPGSTSESPSGTAPGTSTPESGSASPGTSTPESGSASPGSTSESPSGTAPGTSTPESGSASPGSTSSTAESPGPGSTSESPSGTAPGSTSESPSGTAPGTSPSGESSTAPGSTSSTAESPGPGTSPSGESSTAPGTSTPESGSASPGTSPSGESSTAPGTSPSGESSTAPGTSPSGESSTAPGSTSSTAESPGPGSTSSTAESPGPGTSPSGESSTAPGSSPSASTGTGPGSSTPSGATGSPGSSTPSGATGSP

SEQ ID NO: 1052 - protein, 893 aa, Artificial Sequence
  Description of Artificial Sequence: Synthetic polypeptide
SLRRSSCFGGRMDRIGAQSGLGCNSFRYGGASPGTSSTGSPGSSPSASTGTGPGSSPSASTGTGPGTPGSGTASSSPGSSTPSGATGSPGSNPSASTGTGPGASPGTSSTGSPGTPGSGTASSSPGSSTPSGATGSPGTPGSGTASSSPGASPGTSSTGSPGASPGTSSTGSPGTPGSGTASSSPGSSTPSGATGSPGASPGTSSTGSPGTPGSGTASSSPGSSTPSGATGSPGSNPSASTGTGPGSSPSASTGTGPGSSTPSGATGSPGSSTPSGATGSPGASPGTSSTGSPGASPGTSSTGSPGASPGTSSTGSPGTPGSGTASSSPGASPGTSSTGSPGASPGTSSTGSPGASPGTSSTGSPGSSPSASTGTGPGTPGSGTASSSPGASPGTSSTGSPGASPGTSSTGSPGASPGTSSTGSPGSSTPSGATGSPGSSTPSGATGSPGASPGTSSTGSPGTPGSGTASSSPGSSTPSGATGSPGSSTPSGATGSPGSSTPSGATGSPGSSPSASTGTGPGASPGTSSTGSPGASPGTSSTGSPGTPGSGTASSSPGASPGTSSTGSPGASPGTSSTGSPGASPGTSSTGSPGASPGTSSTGSPGTPGSGTASSSPGSSTPSGATGSPGTPGSGTASSSPGSSTPSGATGSPGTPGSGTASSSPGSSTPSGATGSPGSSTPSGATGSPGSSPSASTGTGPGSSPSASTGTGPGASPGTSSTGSPGTPGSGTASSSPGSSTPSGATGSPGSSPSASTGTGPGSSPSASTGTGPGASPGTSSTGSPGASPGTSSTGSPGSSTPSGATGSPGSSPSASTGTGPGASPGTSSTGSPGSSPSASTGTGPGTPGSGTASSSPGSSTPSGATGSPGSSTPSGATGSPGASPGTSSTGSP

SEQ ID NO: 1053 - protein, 904 aa, Artificial Sequence
  Description of Artificial Sequence: Synthetic polypeptide
SLRRSSCFGGRMDRIGAQSGLGCNSFRYGGTSTEPSEGSAPGSEPATSGSETPGSPAGSPTSTEEGSTSSTAESPGPGTSTPESGSASPGSTSESPSGTAPGSTSESPSGTAPGTSTPESGSASPGTSTPESGSASPGSEPATSGSETPGTSESATPESGPGSPAGSPTSTEEGTSTEPSEGSAPGTSESATPESGPGTSTEPSEGSAPGTSTEPSEGSAPGSPAGSPTSTEEGTSTEPSEGSAPGTSTEPSEGSAPGTSESATPESGPGTSESATPESGPGTSTEPSEGSAPGTSTEPSEGSAPGTSESATPESGPGTSTEPSEGSAPGSEPATSGSETPGSPAGSPTSTEEGSSTPSGATGSPGTPGSGTASSSPGSSTPSGATGSPGTSTEPSEGSAPGTSTEPSEGSAPGSEPATSGSETPGSPAGSPTSTEEGSPAGSPTSTEEGTSTEPSEGSAPGASASGAPSTGGTSESATPESGPGSPAGSPTSTEEGSPAGSPTSTEEGSTSSTAESPGPGSTSESPSGTAPGTSPSGESSTAPGTPGSGTASSSPGSSTPSGATGSPGSSPSASTGTGPGSEPATSGSETPGTSESATPESGPGSEPATSGSETPGSTSSTAESPGPGSTSSTAESPGPGTSPSGESSTAPGSEPATSGSETPGSEPATSGSETPGTSTEPSEGSAPGSTSSTAESPGPGTSTPESGSASPGSTSESPSGTAPGTSTEPSEGSAPGTSTEPSEGSAPGTSTEPSEGSAPGSSTPSGATGSPGSSPSASTGTGPGASPGTSSTGSPGSEPATSGSETPGTSESATPESGPGSPAGSPTSTEEGSSTPSGATGSPGSSPSASTGTGPGASPGTSSTGSPGTSESATPESGPGTSTEPSEGSAPGTSTEPSEGSAP

SEQ ID NO: 1054 - protein, 1347 aa, Artificial Sequence
  Description of Artificial Sequence: Synthetic polypeptide
SLRRSSCFGGRMDRIGAQSGLGCNSFRYGGTSTEPSEGSAPGSEPATSGSETPGSPAGSPTSTEEGSTSSTAESPGPGTSTPESGSASPGSTSESPSGTAPGSTSESPSGTAPGTSTPESGSASPGTSTPESGSASPGSEPATSGSETPGTSESATPESGPGSPAGSPTSTEEGTSTEPSEGSAPGTSESATPESGPGTSTEPSEGSAPGTSTEPSEGSAPGSPAGSPTSTEEGTSTEPSEGSAPGTSTEPSEGSAPGTSESATPESGPGTSESATPESGPGTSTEPSEGSAPGTSTEPSEGSAPGTSESATPESGPGTSTEPSEGSAPGSEPATSGSETPGSPAGSPTSTEEGSSTPSGATGSPGTPGSGTASSSPGSSTPSGATGSPGTSTEPSEGSAPGTSTEPSEGSAPGSEPATSGSETPGSPAGSPTSTEEGSPAGSPTSTEEGTSTEPSEGSAPGPEPTGPAPSGGSEPATSGSETPGTSESATPESGPGSPAGSPTSTEEGTSESATPESGPGSPAGSPTSTEEGSPAGSPTSTEEGTSESATPESGPGSPAGSPTSTEEGSPAGSPTSTEEGSTSSTAESPGPGSTSESPSGTAPGTSPSGESSTAPGSTSESPSGTAPGSTSESPSGTAPGTSPSGESSTAPGTSTEPSEGSAPGTSESATPESGPGTSESATPESGPGSEPATSGSETPGTSESATPESGPGTSESATPESGPGTSTEPSEGSAPGTSESATPESGPGTSTEPSEGSAPGTSPSGESSTAPGTSPSGESSTAPGTSPSGESSTAPGTSTEPSEGSAPGSPAGSPTSTEEGTSTEPSEGSAPGSSPSASTGTGPGSSTPSGATGSPGSSTPSGATGSPGSSTPSGATGSPGSSTPSGATGSPGASPGTSSTGSPGASASGAPSTGGTSPSGESSTAPGSTSSTAESPGPGTSPSGESSTAPGTSESATPESGPGTSTEPSEGSAPGTSTEPSEGSAPGSSPSASTGTGPGSSTPSGATGSPGASPGTSSTGSPGTSTPESGSASPGTSPSGESSTAPGTSPSGESSTAPGTSESATPESGPGSEPATSGSETPGTSTEPSEGSAPGSTSESPSGTAPGSTSESPSGTAPGTSTPESGSASPGSPAGSPTSTEEGTSESATPESGPGTSTEPSEGSAPGSPAGSPTSTEEGTSESATPESGPGSEPATSGSETPGSSTPSGATGSPGASPGTSSTGSPGSSTPSGATGSPGSTSESPSGTAPGTSPSGESSTAPGSTSSTAESPGPGSSTPSGATGSPGASPGTSSTGSPGTPGSGTASSSPGSPAGSPTSTEEGSPAGSPTSTEEGTSTEPSEGSAP

SEQ ID NO: 1055 - protein, 942 aa, Artificial Sequence
  Description of Artificial Sequence: Synthetic polypeptide
MAEPAGSPTSTEEGTPGSGTASSSPGSSTPSGATGSPGASPGTSSTGSPGSPAGSPTSTEEGTSESATPESGPGTSTEPSEGSAPGSPAGSPTSTEEGTSTEPSEGSAPGTSTEPSEGSAPGTSESATPESGPGSEPATSGSETPGSEPATSGSETPGSPAGSPTSTEEGTSESATPESGPGTSTEPSEGSAPGTSTEPSEGSAPGSPAGSPTSTEEGTSTEPSEGSAPGTSTEPSEGSAPGTSESATPESGPGTSTEPSEGSAPGTSESATPESGPGSEPATSGSETPGTSTEPSEGSAPGTSTEPSEGSAPGTSESATPESGPGTSESATPESGPGSPAGSPTSTEEGTSESATPESGPGSEPATSGSETPGTSESATPESGPGTSTEPSEGSAPGTSTEPSEGSAPGTSTEPSEGSAPGTSTEPSEGSAPGTSTEPSEGSAPGTSTEPSEGSAPGSPAGSPTSTEEGTSTEPSEGSAPGTSESATPESGPGSEPATSGSETPGTSESATPESGPGSEPATSGSETPGTSESATPESGPGTSTEPSEGSAPGTSESATPESGPGSPAGSPTSTEEGSPAGSPTSTEEGSPAGSPTSTEEGTSESATPESGPGTSTEPSEGSAPGTSESATPESGPGSEPATSGSETPGTSESATPESGPGSEPATSGSETPGTSESATPESGPGTSTEPSEGSAPGSPAGSPTSTEEGTSESATPESGPGSEPATSGSETPGTSESATPESGPGSPAGSPTSTEEGSPAGSPTSTEEGTSTEPSEGSAPGTSESATPESGPGTSESATPESGPGTSESATPESGPGSEPATSGSETPGSEPATSGSETPGSPAGSPTSTEEGTSTEPSEGSAPGTSTEPSEGSAPGSEPATSGSETPGTSESATPESGPGTSTEPSEGSAPGSLRRSSCFGGRMDRIGAQSGLGCNSFRY

SEQ ID NO: 1056 - protein, 953 aa, Artificial Sequence
  Description of Artificial Sequence: Synthetic polypeptide
MAEPAGSPTSTEEGASPGTSSTGSPGSSTPSGATGSPGSSTPSGATGSPGTSTEPSEGSAPGSEPATSGSETPGSPAGSPTSTEEGSTSSTAESPGPGTSTPESGSASPGSTSESPSGTAPGSTSESPSGTAPGTSTPESGSASPGTSTPESGSASPGSEPATSGSETPGTSESATPESGPGSPAGSPTSTEEGTSTEPSEGSAPGTSESATPESGPGTSTEPSEGSAPGTSTEPSEGSAPGSPAGSPTSTEEGTSTEPSEGSAPGTSTEPSEGSAPGTSESATPESGPGTSESATPESGPGTSTEPSEGSAPGTSTEPSEGSAPGTSESATPESGPGTSTEPSEGSAPGSEPATSGSETPGSPAGSPTSTEEGSSTPSGATGSPGTPGSGTASSSPGSSTPSGATGSPGTSTEPSEGSAPGTSTEPSEGSAPGSEPATSGSETPGSPAGSPTSTEEGSPAGSPTSTEEGTSTEPSEGSAPGASASGAPSTGGTSESATPESGPGSPAGSPTSTEEGSPAGSPTSTEEGSTSSTAESPGPGSTSESPSGTAPGTSPSGESSTAPGTPGSGTASSSPGSSTPSGATGSPGSSPSASTGTGPGSEPATSGSETPGTSESATPESGPGSEPATSGSETPGSTSSTAESPGPGSTSSTAESPGPGTSPSGESSTAPGSEPATSGSETPGSEPATSGSETPGTSTEPSEGSAPGSTSSTAESPGPGTSTPESGSASPGSTSESPSGTAPGTSTEPSEGSAPGTSTEPSEGSAPGTSTEPSEGSAPGSSTPSGATGSPGSSPSASTGTGPGASPGTSSTGSPGSEPATSGSETPGTSESATPESGPGSPAGSPTSTEEGSSTPSGATGSPGSSPSASTGTGPGASPGTSSTGSPGTSESATPESGPGTSTEPSEGSAPGTSTEPSEGSAPGSLRRSSCFGGRMDRIGAQSGLGCNSFRY

SEQ ID NO: 1057 - protein, 173 aa, Artificial Sequence
  Description of Artificial Sequence: Synthetic polypeptide
GSEPATSGSETPGTSESATPESGPGSEPATSGSETPGSPAGSPTSTEEGTSTEPSEGSAPGSEPATSGSETPGSEPATSGSETPGSEPATSGSETPGTSTEPSEGSAPGTSESATPESGPGSEPATSGSETPGTSTEPSEGSAPGSLRRSSCFGGRMDRIGAQSGLGCNSFRY

SEQ ID NO: 1058 - protein, 173 aa, Artificial Sequence
  Description of Artificial Sequence: Synthetic polypeptide
GTSTPESGSASPGTSPSGESSTAPGTSPSGESSTAPGSTSSTAESPGPGSTSESPSGTAPGSTSSTAESPGPGTSPSGESSTAPGTSTPESGSASPGSTSSTAESPGPGTSPSGESSTAPGTSPSGESSTAPGTSPSGESSTAPGSLRRSSCFGGRMDRIGAQSGLGCNSFRY

SEQ ID NO: 1059 - protein, 317 aa, Artificial Sequence
  Description of Artificial Sequence: Synthetic polypeptide
GTSESATPESGPGSEPATSGSETPGTSESATPESGPGSEPATSGSETPGTSESATPESGPGTSTEPSEGSAPGSPAGSPTSTEEGTSESATPESGPGSEPATSGSETPGTSESATPESGPGSPAGSPTSTEEGSPAGSPTSTEEGTSTEPSEGSAPGTSESATPESGPGTSESATPESGPGTSESATPESGPGSEPATSGSETPGSEPATSGSETPGSPAGSPTSTEEGTSTEPSEGSAPGTSTEPSEGSAPGSEPATSGSETPGTSESATPESGPGTSTEPSEGSAPGSLRRSSCFGGRMDRIGAQSGLGCNSFRY

SEQ ID NO: 1060 - protein, 605 aa, Artificial Sequence
  Description of Artificial Sequence: Synthetic polypeptide
GSPAGSPTSTEEGTSESATPESGPGTSTEPSEGSAPGSPAGSPTSTEEGTSTEPSEGSAPGTSTEPSEGSAPGTSESATPESGPGSEPATSGSETPGSEPATSGSETPGSPAGSPTSTEEGTSESATPESGPGTSTEPSEGSAPGTSTEPSEGSAPGSPAGSPTSTEEGTSTEPSEGSAPGTSTEPSEGSAPGTSESATPESGPGTSTEPSEGSAPGTSESATPESGPGSEPATSGSETPGTSTEPSEGSAPGTSTEPSEGSAPGTSESATPESGPGTSESATPESGPGSPAGSPTSTEEGTSESATPESGPGSEPATSGSETPGTSESATPESGPGTSTEPSEGSAPGTSTEPSEGSAPGTSTEPSEGSAPGTSTEPSEGSAPGTSTEPSEGSAPGTSTEPSEGSAPGSPAGSPTSTEEGTSTEPSEGSAPGTSESATPESGPGSEPATSGSETPGTSESATPESGPGSEPATSGSETPGTSESATPESGPGTSTEPSEGSAPGTSESATPESGPGSPAGSPTSTEEGSPAGSPTSTEEGSPAGSPTSTEEGTSESATPESGPGTSTEPSEGSAPGSLRRSSCFGGRMDRIGAQSGLGCNSFRY

SEQ ID NO: 1061 - protein, 605 aa, Artificial Sequence
  Description of Artificial Sequence: Synthetic polypeptide
GSTSSTAESPGPGSTSSTAESPGPGSTSESPSGTAPGSTSSTAESPGPGSTSSTAESPGPGTSTPESGSASPGSTSESPSGTAPGTSPSGESSTAPGSTSESPSGTAPGSTSESPSGTAPGTSPSGESSTAPGSTSESPSGTAPGSTSESPSGTAPGTSPSGESSTAPGSTSESPSGTAPGSTSESPSGTAPGSTSESPSGTAPGTSTPESGSASPGSTSESPSGTAPGTSTPESGSASPGSTSSTAESPGPGSTSSTAESPGPGTSTPESGSASPGTSTPESGSASPGSTSESPSGTAPGTSTPESGSASPGTSTPESGSASPGSTSESPSGTAPGSTSESPSGTAPGSTSESPSGTAPGSTSSTAESPGPGTSTPESGSASPGTSTPESGSASPGSTSESPSGTAPGSTSESPSGTAPGTSTPESGSASPGSTSESPSGTAPGSTSESPSGTAPGTSTPESGSASPGTSPSGESSTAPGSTSSTAESPGPGTSPSGESSTAPGSTSSTAESPGPGTSTPESGSASPGSTSESPSGTAPGSTSSTAESPGPGTSTPESGSASPGTSTPESGSASPGSLRRSSCFGGRMDRIGAQSGLGCNSFRY

SEQ ID NO: 1062 - protein, 865 aa, Artificial Sequence
  Description of Artificial Sequence: Synthetic polypeptide
GSSESGSSEGGPGSSESGSSEGGPGESPGGSSGSESGSGGEPSESGSSGESPGGSSGSESGESPGGSSGSESGSSESGSSEGGPGSSESGSSEGGPGSSESGSSEGGPGESPGGSSGSESGESPGGSSGSESGESPGGSSGSESGSSESGSSEGGPGSSESGSSEGGPGSSESGSSEGGPGSSESGSSEGGPGSSESGSSEGGPGSSESGSSEGGPGSGGEPSESGSSGESPGGSSGSESGESPGGSSGSESGSGGEPSESGSSGSEGSSGPGESSGSSESGSSEGGPGSGGEPSESGSSGSEGSSGPGESSGSSESGSSEGGPGSGGEPSESGSSGESPGGSSGSESGSGGEPSESGSSGSGGEPSESGSSGSSESGSSEGGPGSGGEPSESGSSGSGGEPSESGSSGSEGSSGPGESSGESPGGSSGSESGSEGSSGPGESSGSEGSSGPGESSGSGGEPSESGSSGSSESGSSEGGPGSSESGSSEGGPGESPGGSSGSESGSGGEPSESGSSGSEGSSGPGESSGESPGGSSGSESGSEGSSGPGSSESGSSEGGPGSGGEPSESGSSGSEGSSGPGESSGSEGSSGPGESSGSEGSSGPGESSGSGGEPSESGSSGSGGEPSESGSSGESPGGSSGSESGESPGGSSGSESGSGGEPSESGSSGSEGSSGPGESSGESPGGSSGSESGSSESGSSEGGPGSSESGSSEGGPGSSESGSSEGGPGSGGEPSESGSSGSSESGSSEGGPGESPGGSSGSESGSGGEPSESGSSGSSESGSSEGGPGESPGGSSGSESGSGGEPSESGSSGESPGGSSGSESGSGGEPSESGSSGSLRRSSCFGGRMDRIGAQSGLGCNSFRY

SEQ ID NO: 1063 - protein, 893 aa, Artificial Sequence
  Description of Artificial Sequence: Synthetic polypeptide
GSPAGSPTSTEEGTSESATPESGPGTSTEPSEGSAPGSPAGSPTSTEEGTSTEPSEGSAPGTSTEPSEGSAPGTSESATPESGPGSEPATSGSETPGSEPATSGSETPGSPAGSPTSTEEGTSESATPESGPGTSTEPSEGSAPGTSTEPSEGSAPGSPAGSPTSTEEGTSTEPSEGSAPGTSTEPSEGSAPGTSESATPESGPGTSTEPSEGSAPGTSESATPESGPGSEPATSGSETPGTSTEPSEGSAPGTSTEPSEGSAPGTSESATPESGPGTSESATPESGPGSPAGSPTSTEEGTSESATPESGPGSEPATSGSETPGTSESATPESGPGTSTEPSEGSAPGTSTEPSEGSAPGTSTEPSEGSAPGTSTEPSEGSAPGTSTEPSEGSAPGTSTEPSEGSAPGSPAGSPTSTEEGTSTEPSEGSAPGTSESATPESGPGSEPATSGSETPGTSESATPESGPGSEPATSGSETPGTSESATPESGPGTSTEPSEGSAPGTSESATPESGPGSPAGSPTSTEEGSPAGSPTSTEEGSPAGSPTSTEEGTSESATPESGPGTSTEPSEGSAPGTSESATPESGPGSEPATSGSETPGTSESATPESGPGSEPATSGSETPGTSESATPESGPGTSTEPSEGSAPGSPAGSPTSTEEGTSESATPESGPGSEPATSGSETPGTSESATPESGPGSPAGSPTSTEEGSPAGSPTSTEEGTSTEPSEGSAPGTSESATPESGPGTSESATPESGPGTSESATPESGPGSEPATSGSETPGSEPATSGSETPGSPAGSPTSTEEGTSTEPSEGSAPGTSTEPSEGSAPGSEPATSGSETPGTSESATPESGPGTSTEPSEGSAPGSLRRSSCFGGRMDRIGAQSGLGCNSFRY

SEQ ID NO: 1064 - protein, 904 aa, Artificial Sequence
  Description of Artificial Sequence: Synthetic polypeptide
  MOD_RES (430)..(432): Any amino acid
  MOD_RES (443)..(446): Any amino acid
GSTSESPSGTAPGTSPSGESSTAPGSTSESPSGTAPGSTSESPSGTAPGTSTPESGSASPGTSTPESGSASPGSTSESPSGTAPGSTSESPSGTAPGTSPSGESSTAPGSTSESPSGTAPGTSPSGESSTAPGTSPSGESSTAPGSTSSTAESPGPGTSPSGESSTAPGTSPSGESSTAPGSTSSTAESPGPGTSTPESGSASPGTSTPESGSASPGSTSESPSGTAPGSTSESPSGTAPGTSTPESGSASPGSTSSTAESPGPGTSTPESGSASPGSTSESPSGTAPGTSPSGESSTAPGSTSSTAESPGPGTSPSGESSTAPGTSTPESGSASPGSTSSTAESPGPGSTSSTAESPGPGSTSSTAESPGPGSTSSTAESPGPGTSPSGESSTAPGSTSESPSGTAPGSTSESPSGTAPGTSTPESGPXXXGASASGAPSTXXXXSESPSGTAPGSTSESPSGTAPGSTSESPSGTAPGSTSESPSGTAPGSTSESPSGTAPGSTSESPSGTAPGTSTPESGSASPGTSPSGESSTAPGTSPSGESSTAPGSTSSTAESPGPGTSPSGESSTAPGTSTPESGSASPGSTSESPSGTAPGSTSESPSGTAPGTSPSGESSTAPGSTSESPSGTAPGTSTPESGSASPGTSTPESGSASPGSTSESPSGTAPGTSTPESGSASPGSTSSTAESPGPGSTSESPSGTAPGSTSESPSGTAPGTSPSGESSTAPGSTSSTAESPGPGTSPSGESSTAPGTSTPESGSASPGTSPSGESSTAPGTSPSGESSTAPGTSPSGESSTAPGSTSSTAESPGPGSTSSTAESPGPGTSPSGESSTAPGSSPSASTGTGPGSSTPSGATGSPGSSTPSGATGSPGSLRRSSCFGGRMDRIGAQSGLGCNSFRY

SEQ ID NO: 1065 - protein, 893 aa, Artificial Sequence
  Description of Artificial Sequence: Synthetic polypeptide
GASPGTSSTGSPGSSPSASTGTGPGSSPSASTGTGPGTPGSGTASSSPGSSTPSGATGSPGSNPSASTGTGPGASPGTSSTGSPGTPGSGTASSSPGSSTPSGATGSPGTPGSGTASSSPGASPGTSSTGSPGASPGTSSTGSPGTPGSGTASSSPGSSTPSGATGSPGASPGTSSTGSPGTPGSGTASSSPGSSTPSGATGSPGSNPSASTGTGPGSSPSASTGTGPGSSTPSGATGSPGSSTPSGATGSPGASPGTSSTGSPGASPGTSSTGSPGASPGTSSTGSPGTPGSGTASSSPGASPGTSSTGSPGASPGTSSTGSPGASPGTSSTGSPGSSPSASTGTGPGTPGSGTASSSPGASPGTSSTGSPGASPGTSSTGSPGASPGTSSTGSPGSSTPSGATGSPGSSTPSGATGSPGASPGTSSTGSPGTPGSGTASSSPGSSTPSGATGSPGSSTPSGATGSPGSSTPSGATGSPGSSPSASTGTGPGASPGTSSTGSPGASPGTSSTGSPGTPGSGTASSSPGASPGTSSTGSPGASPGTSSTGSPGASPGTSSTGSPGASPGTSSTGSPGTPGSGTASSSPGSSTPSGATGSPGTPGSGTASSSPGSSTPSGATGSPGTPGSGTASSSPGSSTPSGATGSPGSSTPSGATGSPGSSPSASTGTGPGSSPSASTGTGPGASPGTSSTGSPGTPGSGTASSSPGSSTPSGATGSPGSSPSASTGTGPGSSPSASTGTGPGASPGTSSTGSPGASPGTSSTGSPGSSTPSGATGSPGSSPSASTGTGPGASPGTSSTGSPGSSPSASTGTGPGTPGSGTASSSPGSSTPSGATGSPGSSTPSGATGSPGASPGTSSTGSPGSLRRSSCFGGRMDRIGAQSGLGCNSFRY

SEQ ID NO: 1066 - protein, 904 aa, Artificial Sequence
  Description of Artificial Sequence: Synthetic polypeptide
GTSTEPSEGSAPGSEPATSGSETPGSPAGSPTSTEEGSTSSTAESPGPGTSTPESGSASPGSTSESPSGTAPGSTSESPSGTAPGTSTPESGSASPGTSTPESGSASPGSEPATSGSETPGTSESATPESGPGSPAGSPTSTEEGTSTEPSEGSAPGTSESATPESGPGTSTEPSEGSAPGTSTEPSEGSAPGSPAGSPTSTEEGTSTEPSEGSAPGTSTEPSEGSAPGTSESATPESGPGTSESATPESGPGTSTEPSEGSAPGTSTEPSEGSAPGTSESATPESGPGTSTEPSEGSAPGSEPATSGSETPGSPAGSPTSTEEGSSTPSGATGSPGTPGSGTASSSPGSSTPSGATGSPGTSTEPSEGSAPGTSTEPSEGSAPGSEPATSGSETPGSPAGSPTSTEEGSPAGSPTSTEEGTSTEPSEGSAPGASASGAPSTGGTSESATPESGPGSPAGSPTSTEEGSPAGSPTSTEEGSTSSTAESPGPGSTSESPSGTAPGTSPSGESSTAPGTPGSGTASSSPGSSTPSGATGSPGSSPSASTGTGPGSEPATSGSETPGTSESATPESGPGSEPATSGSETPGSTSSTAESPGPGSTSSTAESPGPGTSPSGESSTAPGSEPATSGSETPGSEPATSGSETPGTSTEPSEGSAPGSTSSTAESPGPGTSTPESGSASPGSTSESPSGTAPGTSTEPSEGSAPGTSTEPSEGSAPGTSTEPSEGSAPGSSTPSGATGSPGSSPSASTGTGPGASPGTSSTGSPGSEPATSGSETPGTSESATPESGPGSPAGSPTSTEEGSSTPSGATGSPGSSPSASTGTGPGASPGTSSTGSPGTSESATPESGPGTSTEPSEGSAPGTSTEPSEGSAPGSLRRSSCFGGRMDRIGAQSGLGCNSFRY

SEQ ID NO: 1067 - protein, 177 aa, Artificial Sequence
  Description of Artificial Sequence: Synthetic polypeptide
SPKMVQGSGGFGRKMDRISSSSGLGCKVLRRHGGSEPATSGSETPGTSESATPESGPGSEPATSGSETPGSPAGSPTSTEEGTSTEPSEGSAPGSEPATSGSETPGSEPATSGSETPGSEPATSGSETPGTSTEPSEGSAPGTSESATPESGPGSEPATSGSETPGTSTEPSEGSAP

SEQ ID NO: 1068 - protein, 177 aa, Artificial Sequence
  Description of Artificial Sequence: Synthetic polypeptide
SPKMVQGSGGFGRKMDRISSSSGLGCKVLRRHGGTSTPESGSASPGTSPSGESSTAPGTSPSGESSTAPGSTSSTAESPGPGSTSESPSGTAPGSTSSTAESPGPGTSPSGESSTAPGTSTPESGSASPGSTSSTAESPGPGTSPSGESSTAPGTSPSGESSTAPGTSPSGESSTAP

SEQ ID NO: 1069 - protein, 321 aa, Artificial Sequence
  Description of Artificial Sequence: Synthetic polypeptide
SPKMVQGSGGFGRKMDRISSSSGLGCKVLRRHGGTSESATPESGPGSEPATSGSETPGTSESATPESGPGSEPATSGSETPGTSESATPESGPGTSTEPSEGSAPGSPAGSPTSTEEGTSESATPESGPGSEPATSGSETPGTSESATPESGPGSPAGSPTSTEEGSPAGSPTSTEEGTSTEPSEGSAPGTSESATPESGPGTSESATPESGPGTSESATPESGPGSEPATSGSETPGSEPATSGSETPGSPAGSPTSTEEGTSTEPSEGSAPGTSTEPSEGSAPGSEPATSGSETPGTSESATPESGPGTSTEPSEGSAP

SEQ ID NO: 1070 - protein, 609 aa, Artificial Sequence
  Description of Artificial Sequence: Synthetic polypeptide
SPKMVQGSGGFGRKMDRISSSSGLGCKVLRRHGGSPAGSPTSTEEGTSESATPESGPGTSTEPSEGSAPGSPAGSPTSTEEGTSTEPSEGSAPGTSTEPSEGSAPGTSESATPESGPGSEPATSGSETPGSEPATSGSETPGSPAGSPTSTEEGTSESATPESGPGTSTEPSEGSAPGTSTEPSEGSAPGSPAGSPTSTEEGTSTEPSEGSAPGTSTEPSEGSAPGTSESATPESGPGTSTEPSEGSAPGTSESATPESGPGSEPATSGSETPGTSTEPSEGSAPGTSTEPSEGSAPGTSESATPESGPGTSESATPESGPGSPAGSPTSTEEGTSESATPESGPGSEPATSGSETPGTSESATPESGPGTSTEPSEGSAPGTSTEPSEGSAPGTSTEPSEGSAPGTSTEPSEGSAPGTSTEPSEGSAPGTSTEPSEGSAPGSPAGSPTSTEEGTSTEPSEGSAPGTSESATPESGPGSEPATSGSETPGTSESATPESGPGSEPATSGSETPGTSESATPESGPGTSTEPSEGSAPGTSESATPESGPGSPAGSPTSTEEGSPAGSPTSTEEGSPAGSPTSTEEGTSESATPESGPGTSTEPSEGSAP

SEQ ID NO: 1071 - protein, 609 aa, Artificial Sequence
  Description of Artificial Sequence: Synthetic polypeptide
SPKMVQGSGGFGRKMDRISSSSGLGCKVLRRHGGSTSSTAESPGPGSTSSTAESPGPGSTSESPSGTAPGSTSSTAESPGPGSTSSTAESPGPGTSTPESGSASPGSTSESPSGTAPGTSPSGESSTAPGSTSESPSGTAPGSTSESPSGTAPGTSPSGESSTAPGSTSESPSGTAPGSTSESPSGTAPGTSPSGESSTAPGSTSESPSGTAPGSTSESPSGTAPGSTSESPSGTAPGTSTPESGSASPGSTSESPSGTAPGTSTPESGSASPGSTSSTAESPGPGSTSSTAESPGPGTSTPESGSASPGTSTPESGSASPGSTSESPSGTAPGTSTPESGSASPGTSTPESGSASPGSTSESPSGTAPGSTSESPSGTAPGSTSESPSGTAPGSTSSTAESPGPGTSTPESGSASPGTSTPESGSASPGSTSESPSGTAPGSTSESPSGTAPGTSTPESGSASPGSTSESPSGTAPGSTSESPSGTAPGTSTPESGSASPGTSPSGESSTAPGSTSSTAESPGPGTSPSGESSTAPGSTSSTAESPGPGTSTPESGSASPGSTSESPSGTAPGSTSSTAESPGPGTSTPESGSASPGTSTPESGSASP

SEQ ID NO: 1072 - protein, 869 aa, Artificial Sequence
  Description of Artificial Sequence: Synthetic polypeptide
SPKMVQGSGGFGRKMDRISSSSGLGCKVLRRHGGSSESGSSEGGPGSSESGSSEGGPGESPGGSSGSESGSGGEPSESGSSGESPGGSSGSESGESPGGSSGSESGSSESGSSEGGPGSSESGSSEGGPGSSESGSSEGGPGESPGGSSGSESGESPGGSSGSESGESPGGSSGSESGSSESGSSEGGPGSSESGSSEGGPGSSESGSSEGGPGSSESGSSEGGPGSSESGSSEGGPGSSESGSSEGGPGSGGEPSESGSSGESPGGSSGSESGESPGGSSGSESGSGGEPSESGSSGSEGSSGPGESSGSSESGSSEGGPGSGGEPSESGSSGSEGSSGPGESSGSSESGSSEGGPGSGGEPSESGSSGESPGGSSGSESGSGGEPSESGSSGSGGEPSESGSSGSSESGSSEGGPGSGGEPSESGSSGSGGEPSESGSSGSEGSSGPGESSGESPGGSSGSESGSEGSSGPGESSGSEGSSGPGESSGSGGEPSESGSSGSSESGSSEGGPGSSESGSSEGGPGESPGGSSGSESGSGGEPSESGSSGSEGSSGPGESSGESPGGSSGSESGSEGSSGPGSSESGSSEGGPGSGGEPSESGSSGSEGSSGPGESSGSEGSSGPGESSGSEGSSGPGESSGSGGEPSESGSSGSGGEPSESGSSGESPGGSSGSESGESPGGSSGSESGSGGEPSESGSSGSEGSSGPGESSGESPGGSSGSESGSSESGSSEGGPGSSESGSSEGGPGSSESGSSEGGPGSGGEPSESGSSGSSESGSSEGGPGESPGGSSGSESGSGGEPSESGSSGSSESGSSEGGPGESPGGSSGSESGSGGEPSESGSSGESPGGSSGSESGSGGEPSESGSS

SEQ ID NO: 1073 - protein, 897 aa, Artificial Sequence
  Description of Artificial Sequence: Synthetic polypeptide
SPKMVQGSGGFGRKMDRISSSSGLGCKVLRRHGGSPAGSPTSTEEGTSESATPESGPGTSTEPSEGSAPGSPAGSPTSTEEGTSTEPSEGSAPGTSTEPSEGSAPGTSESATPESGPGSEPATSGSETPGSEPATSGSETPGSPAGSPTSTEEGTSESATPESGPGTSTEPSEGSAPGTSTEPSEGSAPGSPAGSPTSTEEGTSTEPSEGSAPGTSTEPSEGSAPGTSESATPESGPGTSTEPSEGSAPGTSESATPESGPGSEPATSGSETPGTSTEPSEGSAPGTSTEPSEGSAPGTSESATPESGPGTSESATPESGPGSPAGSPTSTEEGTSESATPESGPGSEPATSGSETPGTSESATPESGPGTSTEPSEGSAPGTSTEPSEGSAPGTSTEPSEGSAPGTSTEPSEGSAPGTSTEPSEGSAPGTSTEPSEGSAPGSPAGSPTSTEEGTSTEPSEGSAPGTSESATPESGPGSEPATSGSETPGTSESATPESGPGSEPATSGSETPGTSESATPESGPGTSTEPSEGSAPGTSESATPESGPGSPAGSPTSTEEGSPAGSPTSTEEGSPAGSPTSTEEGTSESATPESGPGTSTEPSEGSAPGTSESATPESGPGSEPATSGSETPGTSESATPESGPGSEPATSGSETPGTSESATPESGPGTSTEPSEGSAPGSPAGSPTSTEEGTSESATPESGPGSEPATSGSETPGTSESATPESGPGSPAGSPTSTEEGSPAGSPTSTEEGTSTEPSEGSAPGTSESATPESGPGTSESATPESGPGTSESATPESGPGSEPATSGSETPGSEPATSGSETPGSPAGSPTSTEEGTSTEPSEGSAPGTSTEPSEGSAPGSEPATSGSETPGTSESATPESGPGTSTEPSEGSAP

SEQ ID NO: 1074 - protein, 908 aa, Artificial Sequence
  Description of Artificial Sequence: Synthetic polypeptide
  MOD_RES (463)..(465): Any amino acid
  MOD_RES (476)..(479): Any amino acid
SPKMVQGSGGFGRKMDRISSSSGLGCKVLRRHGGSTSESPSGTAPGTSPSGESSTAPGSTSESPSGTAPGSTSESPSGTAPGTSTPESGSASPGTSTPESGSASPGSTSESPSGTAPGSTSESPSGTAPGTSPSGESSTAPGSTSESPSGTAPGTSPSGESSTAPGTSPSGESSTAPGSTSSTAESPGPGTSPSGESSTAPGTSPSGESSTAPGSTSSTAESPGPGTSTPESGSASPGTSTPESGSASPGSTSESPSGTAPGSTSESPSGTAPGTSTPESGSASPGSTSSTAESPGPGTSTPESGSASPGSTSESPSGTAPGTSPSGESSTAPGSTSSTAESPGPGTSPSGESSTAPGTSTPESGSASPGSTSSTAESPGPGSTSSTAESPGPGSTSSTAESPGPGSTSSTAESPGPGTSPSGESSTAPGSTSESPSGTAPGSTSESPSGTAPGTSTPESGPXXXGASASGAPSTXXXXSESPSGTAPGSTSESPSGTAPGSTSESPSGTAPGSTSESPSGTAPGSTSESPSGTAPGSTSESPSGTAPGTSTPESGSASPGTSPSGESSTAPGTSPSGESSTAPGSTSSTAESPGPGTSPSGESSTAPGTSTPESGSASPGSTSESPSGTAPGSTSESPSGTAPGTSPSGESSTAPGSTSESPSGTAPGTSTPESGSASPGTSTPESGSASPGSTSESPSGTAPGTSTPESGSASPGSTSSTAESPGPGSTSESPSGTAPGSTSESPSGTAPGTSPSGESSTAPGSTSSTAESPGPGTSPSGESSTAPGTSTPESGSASPGTSPSGESSTAPGTSPSGESSTAPGTSPSGESSTAPGSTSSTAESPGPGSTSSTAESPGPGTSPSGESSTAPGSSPSASTGTGPGSSTPSGATGSPGSSTPSGATGSP

SEQ ID NO: 1075 - protein, 897 aa, Artificial Sequence
  Description of Artificial Sequence: Synthetic polypeptide
SPKMVQGSGGFGRKMDRISSSSGLGCKVLRRHGGASPGTSSTGSPGSSPSASTGTGPGSSPSASTGTGPGTPGSGTASSSPGSSTPSGATGSPGSNPSASTGTGPGASPGTSSTGSPGTPGSGTASSSPGSSTPSGATGSPGTPGSGTASSSPGASPGTSSTGSPGASPGTSSTGSPGTPGSGTASSSPGSSTPSGATGSPGASPGTSSTGSPGTPGSGTASSSPGSSTPSGATGSPGSNPSASTGTGPGSSPSASTGTGPGSSTPSGATGSPGSSTPSGATGSPGASPGTSSTGSPGASPGTSSTGSPGASPGTSSTGSPGTPGSGTASSSPGASPGTSSTGSPGASPGTSSTGSPGASPGTSSTGSPGSSPSASTGTGPGTPGSGTASSSPGASPGTSSTGSPGASPGTSSTGSPGASPGTSSTGSPGSSTPSGATGSPGSSTPSGATGSPGASPGTSSTGSPGTPGSGTASSSPGSSTPSGATGSPGSSTPSGATGSPGSSTPSGATGSPGSSPSASTGTGPGASPGTSSTGSPGASPGTSSTGSPGTPGSGTASSSPGASPGTSSTGSPGASPGTSSTGSPGASPGTSSTGSPGASPGTSSTGSPGTPGSGTASSSPGSSTPSGATGSPGTPGSGTASSSPGSSTPSGATGSPGTPGSGTASSSPGSSTPSGATGSPGSSTPSGATGSPGSSPSASTGTGPGSSPSASTGTGPGASPGTSSTGSPGTPGSGTASSSPGSSTPSGATGSPGSSPSASTGTGPGSSPSASTGTGPGASPGTSSTGSPGASPGTSSTGSPGSSTPSGATGSPGSSPSASTGTGPGASPGTSSTGSPGSSPSASTGTGPGTPGSGTASSSPGSSTPSGATGSPGSSTPSGATGSPGASPGTSSTGSP

SEQ ID NO: 1076 - protein, 908 aa, Artificial Sequence
  Description of Artificial Sequence: Synthetic polypeptide
SPKMVQGSGGFGRKMDRISSSSGLGCKVLRRHGGTSTEPSEGSAPGSEPATSGSETPGSPAGSPTSTEEGSTSSTAESPGPGTSTPESGSASPGSTSESPSGTAPGSTSESPSGTAPGTSTPESGSASPGTSTPESGSASPGSEPATSGSETPGTSESATPESGPGSPAGSPTSTEEGTSTEPSEGSAPGTSESATPESGPGTSTEPSEGSAPGTSTEPSEGSAPGSPAGSPTSTEEGTSTEPSEGSAPGTSTEPSEGSAPGTSESATPESGPGTSESATPESGPGTSTEPSEGSAPGTSTEPSEGSAPGTSESATPESGPGTSTEPSEGSAPGSEPATSGSETPGSPAGSPTSTEEGSSTPSGATGSPGTPGSGTASSSPGSSTPSGATGSPGTSTEPSEGSAPGTSTEPSEGSAPGSEPATSGSETPGSPAGSPTSTEEGSPAGSPTSTEEGTSTEPSEGSAPGASASGAPSTGGTSESATPESGPGSPAGSPTSTEEGSPAGSPTSTEEGSTSSTAESPGPGSTSESPSGTAPGTSPSGESSTAPGTPGSGTASSSPGSSTPSGATGSPGSSPSASTGTGPGSEPATSGSETPGTSESATPESGPGSEPATSGSETPGSTSSTAESPGPGSTSSTAESPGPGTSPSGESSTAPGSEPATSGSETPGSEPATSGSETPGTSTEPSEGSAPGSTSSTAESPGPGTSTPESGSASPGSTSESPSGTAPGTSTEPSEGSAPGTSTEPSEGSAPGTSTEPSEGSAPGSSTPSGATGSPGSSPSASTGTGPGASPGTSSTGSPGSEPATSGSETPGTSESATPESGPGSPAGSPTSTEEGSSTPSGATGSPGSSPSASTGTGPGASPGTSSTGSPGTSESATPESGPGTSTEPSEGSAPGTSTEPSEGSAP

SEQ ID NO: 1077 - protein, 1351 aa, Artificial Sequence
  Description of Artificial Sequence: Synthetic polypeptide
SPKMVQGSGGFGRKMDRISSSSGLGCKVLRRHGGTSTEPSEGSAPGSEPATSGSETPGSPAGSPTSTEEGSTSSTAESPGPGTSTPESGSASPGSTSESPSGTAPGSTSESPSGTAPGTSTPESGSASPGTSTPESGSASPGSEPATSGSETPGTSESATPESGPGSPAGSPTSTEEGTSTEPSEGSAPGTSESATPESGPGTSTEPSEGSAPGTSTEPSEGSAPGSPAGSPTSTEEGTSTEPSEGSAPGTSTEPSEGSAPGTSESATPESGPGTSESATPESGPGTSTEPSEGSAPGTSTEPSEGSAPGTSESATPESGPGTSTEPSEGSAPGSEPATSGSETPGSPAGSPTSTEEGSSTPSGATGSPGTPGSGTASSSPGSSTPSGATGSPGTSTEPSEGSAPGTSTEPSEGSAPGSEPATSGSETPGSPAGSPTSTEEGSPAGSPTSTEEGTSTEPSEGSAPGPEPTGPAPSGGSEPATSGSETPGTSESATPESGPGSPAGSPTSTEEGTSESATPESGPGSPAGSPTSTEEGSPAGSPTSTEEGTSESATPESGPGSPAGSPTSTEEGSPAGSPTSTEEGSTSSTAESPGPGSTSESPSGTAPGTSPSGESSTAPGSTSESPSGTAPGSTSESPSGTAPGTSPSGESSTAPGTSTEPSEGSAPGTSESATPESGPGTSESATPESGPGSEPATSGSETPGTSESATPESGPGTSESATPESGPGTSTEPSEGSAPGTSESATPESGPGTSTEPSEGSAPGTSPSGESSTAPGTSPSGESSTAPGTSPSGESSTAPGTSTEPSEGSAPGSPAGSPTSTEEGTSTEPSEGSAPGSSPSASTGTGPGSSTPSGATGSPGSSTPSGATGSPGSSTPSGATGSPGSSTPSGATGSPGASPGTSSTGSPGASASGAPSTGGTSPSGESSTAPGSTSSTAESPGPGTSPSGESSTAPGTSESATPESGPGTSTEPSEGSAPGTSTEPSEGSAPGSSPSASTGTGPGSSTPSGATGSPGASPGTSSTGSPGTSTPESGSASPGTSPSGESSTAPGTSPSGESSTAPGTSESATPESGPGSEPATSGSETPGTSTEPSEGSAPGSTSESPSGTAPGSTSESPSGTAPGTSTPESGSASPGSPAGSPTSTEEGTSESATPESGPGTSTEPSEGSAPGSPAGSPTSTEEGTSESATPESGPGSEPATSGSETPGSSTPSGATGSPGASPGTSSTGSPGSSTPSGATGSPGSTSESPSGTAPGTSPSGESSTAPGSTSSTAESPGPGSSTPSGATGSPGASPGTSSTGSPGTPGSGTASSSPGSPAGSPTSTEEGSPAGSPTSTEEGTSTEPSEGSAP

SEQ ID NO: 1078 - protein, 946 aa, Artificial Sequence
  Description of Artificial Sequence: Synthetic polypeptide
MAEPAGSPTSTEEGTPGSGTASSSPGSSTPSGATGSPGASPGTSSTGSPGSPAGSPTSTEEGTSESATPESGPGTSTEPSEGSAPGSPAGSPTSTEEGTSTEPSEGSAPGTSTEPSEGSAPGTSESATPESGPGSEPATSGSETPGSEPATSGSETPGSPAGSPTSTEEGTSESATPESGPGTSTEPSEGSAPGTSTEPSEGSAPGSPAGSPTSTEEGTSTEPSEGSAPGTSTEPSEGSAPGTSESATPESGPGTSTEPSEGSAPGTSESATPESGPGSEPATSGSETPGTSTEPSEGSAPGTSTEPSEGSAPGTSESATPESGPGTSESATPESGPGSPAGSPTSTEEGTSESATPESGPGSEPATSGSETPGTSESATPESGPGTSTEPSEGSAPGTSTEPSEGSAPGTSTEPSEGSAPGTSTEPSEGSAPGTSTEPSEGSAPGTSTEPSEGSAPGSPAGSPTSTEEGTSTEPSEGSAPGTSESATPESGPGSEPATSGSETPGTSESATPESGPGSEPATSGSETPGTSESATPESGPGTSTEPSEGSAPGTSESATPESGPGSPAGSPTSTEEGSPAGSPTSTEEGSPAGSPTSTEEGTSESATPESGPGTSTEPSEGSAPGTSESATPESGPGSEPATSGSETPGTSESATPESGPGSEPATSGSETPGTSESATPESGPGTSTEPSEGSAPGSPAGSPTSTEEGTSESATPESGPGSEPATSGSETPGTSESATPESGPGSPAGSPTSTEEGSPAGSPTSTEEGTSTEPSEGSAPGTSESATPESGPGTSESATPESGPGTSESATPESGPGSEPATSGSETPGSEPATSGSETPGSPAGSPTSTEEGTSTEPSEGSAPGTSTEPSEGSAPGSEPATSGSETPGTSESATPESGPGTSTEPSEGSAPGSPKMVQGSGGFGRKMDRISSSSGLGCKVLRRH

SEQ ID NO: 1079 - protein, 957 aa, Artificial Sequence
  Description of Artificial Sequence: Synthetic polypeptide
MAEPAGSPTSTEEGASPGTSSTGSPGSSTPSGATGSPGSSTPSGATGSPGTSTEPSEGSAPGSEPATSGSETPGSPAGSPTSTEEGSTSSTAESPGPGTSTPESGSASPGSTSESPSGTAPGSTSESPSGTAPGTSTPESGSASPGTSTPESGSASPGSEPATSGSETPGTSESATPESGPGSPAGSPTSTEEGTSTEPSEGSAPGTSESATPESGPGTSTEPSEGSAPGTSTEPSEGSAPGSPAGSPTSTEEGTSTEPSEGSAPGTSTEPSEGSAPGTSESATPESGPGTSESATPESGPGTSTEPSEGSAPGTSTEPSEGSAPGTSESATPESGPGTSTEPSEGSAPGSEPATSGSETPGSPAGSPTSTEEGSSTPSGATGSPGTPGSGTASSSPGSSTPSGATGSPGTSTEPSEGSAPGTSTEPSEGSAPGSEPATSGSETPGSPAGSPTSTEEGSPAGSPTSTEEGTSTEPSEGSAPGASASGAPSTGGTSESATPESGPGSPAGSPTSTEEGSPAGSPTSTEEGSTSSTAESPGPGSTSESPSGTAPGTSPSGESSTAPGTPGSGTASSSPGSSTPSGATGSPGSSPSASTGTGPGSEPATSGSETPGTSESATPESGPGSEPATSGSETPGSTSSTAESPGPGSTSSTAESPGPGTSPSGESSTAPGSEPATSGSETPGSEPATSGSETPGTSTEPSEGSAPGSTSSTAESPGPGTSTPESGSASPGSTSESPSGTAPGTSTEPSEGSAPGTSTEPSEGSAPGTSTEPSEGSAPGSSTPSGATGSPGSSPSASTGTGPGASPGTSSTGSPGSEPATSGSETPGTSESATPESGPGSPAGSPTSTEEGSSTPSGATGSPGSSPSASTGTGPGASPGTSSTGSPGTSESATPESGPGTSTEPSEGSAPGTSTEPSEGSAPGSPKMVQGSGGFGRKMDRISSSSGLGCKVLRRH

SEQ ID NO: 1080 - protein, 177 aa, Artificial Sequence
  Description of Artificial Sequence: Synthetic polypeptide
GSEPATSGSETPGTSESATPESGPGSEPATSGSETPGSPAGSPTSTEEGTSTEPSEGSAPGSEPATSGSETPGSEPATSGSETPGSEPATSGSETPGTSTEPSEGSAPGTSESATPESGPGSEPATSGSETPGTSTEPSEGSAPGSPKMVQGSGGFGRKMDRISSSSGLGCKVLRRH

SEQ ID NO: 1081 - protein, 177 aa, Artificial Sequence
  Description of Artificial Sequence: Synthetic polypeptide
GTSTPESGSASPGTSPSGESSTAPGTSPSGESSTAPGSTSSTAESPGPGSTSESPSGTAPGSTSSTAESPGPGTSPSGESSTAPGTSTPESGSASPGSTSSTAESPGPGTSPSGESSTAPGTSPSGESSTAPGTSPSGESSTAPGSPKMVQGSGGFGRKMDRISSSSGLGCKVLRRH

SEQ ID NO: 1082 - protein, 321 aa, Artificial Sequence
  Description of Artificial Sequence: Synthetic polypeptide
GTSESATPESGPGSEPATSGSETPGTSESATPESGPGSEPATSGSETPGTSESATPESGPGTSTEPSEGSAPGSPAGSPTSTEEGTSESATPESGPGSEPATSGSETPGTSESATPESGPGSPAGSPTSTEEGSPAGSPTSTEEGTSTEPSEGSAPGTSESATPESGPGTSESATPESGPGTSESATPESGPGSEPATSGSETPGSEPATSGSETPGSPAGSPTSTEEGTSTEPSEGSAPGTSTEPSEGSAPGSEPATSGSETPGTSESATPESGPGTSTEPSEGSAPGSPKMVQGSGGFGRKMDRISSSSGLGCKVLRRH

SEQ ID NO: 1083 - protein, 609 aa, Artificial Sequence
  Description of Artificial Sequence: Synthetic polypeptide
GSPAGSPTSTEEGTSESATPESGPGTSTEPSEGSAPGSPAGSPTSTEEGTSTEPSEGSAPGTSTEPSEGSAPGTSESATPESGPGSEPATSGSETPGSEPATSGSETPGSPAGSPTSTEEGTSESATPESGPGTSTEPSEGSAPGTSTEPSEGSAPGSPAGSPTSTEEGTSTEPSEGSAPGTSTEPSEGSAPGTSESATPESGPGTSTEPSEGSAPGTSESATPESGPGSEPATSGSETPGTSTEPSEGSAPGTSTEPSEGSAPGTSESATPESGPGTSESATPESGPGSPAGSPTSTEEGTSESATPESGPGSEPATSGSETPGTSESATPESGPGTSTEPSEGSAPGTSTEPSEGSAPGTSTEPSEGSAPGTSTEPSEGSAPGTSTEPSEGSAPGTSTEPSEGSAPGSPAGSPTSTEEGTSTEPSEGSAPGTSESATPESGPGSEPATSGSETPGTSESATPESGPGSEPATSGSETPGTSESATPESGPGTSTEPSEGSAPGTSESATPESGPGSPAGSPTSTEEGSPAGSPTSTEEGSPAGSPTSTEEGTSESATPESGPGTSTEPSEGSAPGSPKMVQGSGGFGRKMDRISSSSGLGCKVLRRH

SEQ ID NO: 1084 - protein, 609 aa, Artificial Sequence
  Description of Artificial Sequence: Synthetic polypeptide
GSTSSTAESPGPGSTSSTAESPGPGSTSESPSGTAPGSTSSTAESPGPGSTSSTAESPGPGTSTPESGSASPGSTSESPSGTAPGTSPSGESSTAPGSTSESPSGTAPGSTSESPSGTAPGTSPSGESSTAPGSTSESPSGTAPGSTSESPSGTAPGTSPSGESSTAPGSTSESPSGTAPGSTSESPSGTAPGSTSESPSGTAPGTSTPESGSASPGSTSESPSGTAPGTSTPESGSASPGSTSSTAESPGPGSTSSTAESPGPGTSTPESGSASPGTSTPESGSASPGSTSESPSGTAPGTSTPESGSASPGTSTPESGSASPGSTSESPSGTAPGSTSESPSGTAPGSTSESPSGTAPGSTSSTAESPGPGTSTPESGSASPGTSTPESGSASPGSTSESPSGTAPGSTSESPSGTAPGTSTPESGSASPGSTSESPSGTAPGSTSESPSGTAPGTSTPESGSASPGTSPSGESSTAPGSTSSTAESPGPGTSPSGESSTAPGSTSSTAESPGPGTSTPESGSASPGSTSESPSGTAPGSTSSTAESPGPGTSTPESGSASPGTSTPESGSASPGSPKMVQGSGGFGRKMDRISSSSGLGCKVLRRH

SEQ ID NO: 1085 - protein, 869 aa, Artificial Sequence
  Description of Artificial Sequence: Synthetic polypeptide
GSSESGSSEGGPGSSESGSSEGGPGESPGGSSGSESGSGGEPSESGSSGESPGGSSGSESGESPGGSSGSESGSSESGSSEGGPGSSESGSSEGGPGSSESGSSEGGPGESPGGSSGSESGESPGGSSGSESGESPGGSSGSESGSSESGSSEGGPGSSESGSSEGGPGSSESGSSEGGPGSSESGSSEGGPGSSESGSSEGGPGSSESGSSEGGPGSGGEPSESGSSGESPGGSSGSESGESPGGSSGSESGSGGEPSESGSSGSEGSSGPGESSGSSESGSSEGGPGSGGEPSESGSSGSEGSSGPGESSGSSESGSSEGGPGSGGEPSESGSSGESPGGSSGSESGSGGEPSESGSSGSGGEPSESGSSGSSESGSSEGGPGSGGEPSESGSSGSGGEPSESGSSGSEGSSGPGESSGESPGGSSGSESGSEGSSGPGESSGSEGSSGPGESSGSGGEPSESGSSGSSESGSSEGGPGSSESGSSEGGPGESPGGSSGSESGSGGEPSESGSSGSEGSSGPGESSGESPGGSSGSESGSEGSSGPGSSESGSSEGGPGSGGEPSESGSSGSEGSSGPGESSGSEGSSGPGESSGSEGSSGPGESSGSGGEPSESGSSGSGGEPSESGSSGESPGGSSGSESGESPGGSSGSESGSGGEPSESGSSGSEGSSGPGESSGESPGGSSGSESGSSESGSSEGGPGSSESGSSEGGPGSSESGSSEGGPGSGGEPSESGSSGSSESGSSEGGPGESPGGSSGSESGSGGEPSESGSSGSSESGSSEGGPGESPGGSSGSESGSGGEPSESGSSGESPGGSSGSESGSGGEPSESGSSGSPKMVQGSGGFGRKMDRISSSSGLGCKVLRRH

SEQ ID NO: 1086 - protein, 897 aa, Artificial Sequence
  Description of Artificial Sequence: Synthetic polypeptide
GSPAGSPTSTEEGTSESATPESGPGTSTEPSEGSAPGSPAGSPTSTEEGTSTEPSEGSAPGTSTEPSEGSAPGTSESATPESGPGSEPATSGSETPGSEPATSGSETPGSPAGSPTSTEEGTSESATPESGPGTSTEPSEGSAPGTSTEPSEGSAPGSPAGSPTSTEEGTSTEPSEGSAPGTSTEPSEGSAPGTSESATPESGPGTSTEPSEGSAPGTSESATPESGPGSEPATSGSETPGTSTEPSEGSAPGTSTEPSEGSAPGTSESATPESGPGTSESATPESGPGSPAGSPTSTEEGTSESATPESGPGSEPATSGSETPGTSESATPESGPGTSTEPSEGSAPGTSTEPSEGSAPGTSTEPSEGSAPGTSTEPSEGSAPGTSTEPSEGSAPGTSTEPSEGSAPGSPAGSPTSTEEGTSTEPSEGSAPGTSESATPESGPGSEPATSGSETPGTSESATPESGPGSEPATSGSETPGTSESATPESGPGTSTEPSEGSAPGTSESATPESGPGSPAGSPTSTEEGSPAGSPTSTEEGSPAGSPTSTEEGTSESATPESGPGTSTEPSEGSAPGTSESATPESGPGSEPATSGSETPGTSESATPESGPGSEPATSGSETPGTSESATPESGPGTSTEPSEGSAPGSPAGSPTSTEEGTSESATPESGPGSEPATSGSETPGTSESATPESGPGSPAGSPTSTEEGSPAGSPTSTEEGTSTEPSEGSAPGTSESATPESGPGTSESATPESGPGTSESATPESGPGSEPATSGSETPGSEPATSGSETPGSPAGSPTSTEEGTSTEPSEGSAPGTSTEPSEGSAPGSEPATSGSETPGTSESATPESGPGTSTEPSEGSAPGSPKMVQGSGGFGRKMDRISSSSGLGCKVLRRH

SEQ ID NO: 1087 - protein, 908 aa, Artificial Sequence
  Description of Artificial Sequence: Synthetic polypeptide
  MOD_RES (430)..(432): Any amino acid
  MOD_RES (443)..(446): Any amino acid
GSTSESPSGTAPGTSPSGESSTAPGSTSESPSGTAPGSTSESPSGTAPGTSTPESGSASPGTSTPESGSASPGSTSESPSGTAPGSTSESPSGTAPGTSPSGESSTAPGSTSESPSGTAPGTSPSGESSTAPGTSPSGESSTAPGSTSSTAESPGPGTSPSGESSTAPGTSPSGESSTAPGSTSSTAESPGPGTSTPESGSASPGTSTPESGSASPGSTSESPSGTAPGSTSESPSGTAPGTSTPESGSASPGSTSSTAESPGPGTSTPESGSASPGSTSESPSGTAPGTSPSGESSTAPGSTSSTAESPGPGTSPSGESSTAPGTSTPESGSASPGSTSSTAESPGPGSTSSTAESPGPGSTSSTAESPGPGSTSSTAESPGPGTSPSGESSTAPGSTSESPSGTAPGSTSESPSGTAPGTSTPESGPXXXGASASGAPSTXXXXSESPSGTAPGSTSESPSGTAPGSTSESPSGTAPGSTSESPSGTAPGSTSESPSGTAPGSTSESPSGTAPGTSTPESGSASPGTSPSGESSTAPGTSPSGESSTAPGSTSSTAESPGPGTSPSGESSTAPGTSTPESGSASPGSTSESPSGTAPGSTSESPSGTAPGTSPSGESSTAPGSTSESPSGTAPGTSTPESGSASPGTSTPESGSASPGSTSESPSGTAPGTSTPESGSASPGSTSSTAESPGPGSTSESPSGTAPGSTSESPSGTAPGTSPSGESSTAPGSTSSTAESPGPGTSPSGESSTAPGTSTPESGSASPGTSPSGESSTAPGTSPSGESSTAPGTSPSGESSTAPGSTSSTAESPGPGSTSSTAESPGPGTSPSGESSTAPGSSPSASTGTGPGSSTPSGATGSPGSSTPSGATGSPGSPKMVQGSGGFGRKMDRISSSSGLGCKVLRRH

SEQ ID NO: 1088 - protein, 897 aa, Artificial Sequence
  Description of Artificial Sequence: Synthetic polypeptide
GASPGTSSTGSPGSSPSASTGTGPGSSPSASTGTGPGTPGSGTASSSPGSSTPSGATGSPGSNPSASTGTGPGASPGTSSTGSPGTPGSGTASSSPGSSTPSGATGSPGTPGSGTASSSPGASPGTSSTGSPGASPGTSSTGSPGTPGSGTASSSPGSSTPSGATGSPGASPGTSSTGSPGTPGSGTASSSPGSSTPSGATGSPGSNPSASTGTGPGSSPSASTGTGPGSSTPSGATGSPGSSTPSGATGSPGASPGTSSTGSPGASPGTSSTGSPGASPGTSSTGSPGTPGSGTASSSPGASPGTSSTGSPGASPGTSSTGSPGASPGTSSTGSPGSSPSASTGTGPGTPGSGTASSSPGASPGTSSTGSPGASPGTSSTGSPGASPGTSSTGSPGSSTPSGATGSPGSSTPSGATGSPGASPGTSSTGSPGTPGSGTASSSPGSSTPSGATGSPGSSTPSGATGSPGSSTPSGATGSPGSSPSASTGTGPGASPGTSSTGSPGASPGTSSTGSPGTPGSGTASSSPGASPGTSSTGSPGASPGTSSTGSPGASPGTSSTGSPGASPGTSSTGSPGTPGSGTASSSPGSSTPSGATGSPGTPGSGTASSSPGSSTPSGATGSPGTPGSGTASSSPGSSTPSGATGSPGSSTPSGATGSPGSSPSASTGTGPGSSPSASTGTGPGASPGTSSTGSPGTPGSGTASSSPGSSTPSGATGSPGSSPSASTGTGPGSSPSASTGTGPGASPGTSSTGSPGASPGTSSTGSPGSSTPSGATGSPGSSPSASTGTGPGASPGTSSTGSPGSSPSASTGTGPGTPGSGTASSSPGSSTPSGATGSPGSSTPSGATGSPGASPGTSSTGSPGSPKMVQGSGGFGRKMDRISSSSGLGCKVLRRH

SEQ ID NO: 1089 - protein, 908 aa, Artificial Sequence
  Description of Artificial Sequence: Synthetic polypeptide
GTSTEPSEGSAPGSEPATSGSETPGSPAGSPTSTEEGSTSSTAESPGPGTSTPESGSASPGSTSESPSGTAPGSTSESPSGTAPGTSTPESGSASPGTSTPESGSASPGSEPATSGSETPGTSESATPESGPGSPAGSPTSTEEGTSTEPSEGSAPGTSESATPESGPGTSTEPSEGSAPGTSTEPSEGSAPGSPAGSPTSTEEGTSTEPSEGSAPGTSTEPSEGSAPGTSESATPESGPGTSESATPESGPGTSTEPSEGSAPGTSTEPSEGSAPGTSESATPESGPGTSTEPSEGSAPGSEPATSGSETPGSPAGSPTSTEEGSSTPSGATGSPGTPGSGTASSSPGSSTPSGATGSPGTSTEPSEGSAPGTSTEPSEGSAPGSEPATSGSETPGSPAGSPTSTEEGSPAGSPTSTEEGTSTEPSEGSAPGASASGAPSTGGTSESATPESGPGSPAGSPTSTEEGSPAGSPTSTEEGSTSSTAESPGPGSTSESPSGTAPGTSPSGESSTAPGTPGSGTASSSPGSSTPSGATGSPGSSPSASTGTGPGSEPATSGSETPGTSESATPESGPGSEPATSGSETPGSTSSTAESPGPGSTSSTAESPGPGTSPSGESSTAPGSEPATSGSETPGSEPATSGSETPGTSTEPSEGSAPGSTSSTAESPGPGTSTPESGSASPGSTSESPSGTAPGTSTEPSEGSAPGTSTEPSEGSAPGTSTEPSEGSAPGSSTPSGATGSPGSSPSASTGTGPGASPGTSSTGSPGSEPATSGSETPGTSESATPESGPGSPAGSPTSTEEGSSTPSGATGSPGSSPSASTGTGPGASPGTSSTGSPGTSESATPESGPGTSTEPSEGSAPGTSTEPSEGSAPGSPKMVQGSGGFGRKMDRISSSSGLGCKVLRRH

SEQ ID NO: 1090 - protein, 167 aa, Artificial Sequence
  Description of Artificial Sequence: Synthetic polypeptide
GLSKGCFGLKLDRIGSMSGLGCGGSEPATSGSETPGTSESATPESGPGSEPATSGSETPGSPAGSPTSTEEGTSTEPSEGSAPGSEPATSGSETPGSEPATSGSETPGSEPATSGSETPGTSTEPSEGSAPGTSESATPESGPGSEPATSGSETPGTSTEPSEGSAP

SEQ ID NO: 1091 - protein, 167 aa, Artificial Sequence
  Description of Artificial Sequence: Synthetic polypeptide
GLSKGCFGLKLDRIGSMSGLGCGGTSTPESGSASPGTSPSGESSTAPGTSPSGESSTAPGSTSSTAESPGPGSTSESPSGTAPGSTSSTAESPGPGTSPSGESSTAPGTSTPESGSASPGSTSSTAESPGPGTSPSGESSTAPGTSPSGESSTAPGTSPSGESSTAP

SEQ ID NO: 1092 - protein, 311 aa, Artificial Sequence
  Description of Artificial Sequence: Synthetic polypeptide
GLSKGCFGLKLDRIGSMSGLGCGGTSESATPESGPGSEPATSGSETPGTSESATPESGPGSEPATSGSETPGTSESATPESGPGTSTEPSEGSAPGSPAGSPTSTEEGTSESATPESGPGSEPATSGSETPGTSESATPESGPGSPAGSPTSTEEGSPAGSPTSTEEGTSTEPSEGSAPGTSESATPESGPGTSESATPESGPGTSESATPESGPGSEPATSGSETPGSEPATSGSETPGSPAGSPTSTEEGTSTEPSEGSAPGTSTEPSEGSAPGSEPATSGSETPGTSESATPESGPGTSTEPSEGSAP

SEQ ID NO: 1093 - protein, 599 aa, Artificial Sequence
  Description of Artificial Sequence: Synthetic polypeptide
GLSKGCFGLKLDRIGSMSGLGCGGSPAGSPTSTEEGTSESATPESGPGTSTEPSEGSAPGSPAGSPTSTEEGTSTEPSEGSAPGTSTEPSEGSAPGTSESATPESGPGSEPATSGSETPGSEPATSGSETPGSPAGSPTSTEEGTSESATPESGPGTSTEPSEGSAPGTSTEPSEGSAPGSPAGSPTSTEEGTSTEPSEGSAPGTSTEPSEGSAPGTSESATPESGPGTSTEPSEGSAPGTSESATPESGPGSEPATSGSETPGTSTEPSEGSAPGTSTEPSEGSAPGTSESATPESGPGTSESATPESGPGSPAGSPTSTEEGTSESATPESGPGSEPATSGSETPGTSESATPESGPGTSTEPSEGSAPGTSTEPSEGSAPGTSTEPSEGSAPGTSTEPSEGSAPGTSTEPSEGSAPGTSTEPSEGSAPGSPAGSPTSTEEGTSTEPSEGSAPGTSESATPESGPGSEPATSGSETPGTSESATPESGPGSEPATSGSETPGTSESATPESGPGTSTEPSEGSAPGTSESATPESGPGSPAGSPTSTEEGSPAGSPTSTEEGSPAGSPTSTEEGTSESATPESGPGTSTEPSEGSAP

SEQ ID NO: 1094 - protein, 599 aa, Artificial Sequence
  Description of Artificial Sequence: Synthetic polypeptide
GLSKGCFGLKLDRIGSMSGLGCGGSTSSTAESPGPGSTSSTAESPGPGSTSESPSGTAPGSTSSTAESPGPGSTSSTAESPGPGTSTPESGSASPGSTSESPSGTAPGTSPSGESSTAPGSTSESPSGTAPGSTSESPSGTAPGTSPSGESSTAPGSTSESPSGTAPGSTSESPSGTAPGTSPSGESSTAPGSTSESPSGTAPGSTSESPSGTAPGSTSESPSGTAPGTSTPESGSASPGSTSESPSGTAPGTSTPESGSASPGSTSSTAESPGPGSTSSTAESPGPGTSTPESGSASPGTSTPESGSASPGSTSESPSGTAPGTSTPESGSASPGTSTPESGSASPGSTSESPSGTAPGSTSESPSGTAPGSTSESPSGTAPGSTSSTAESPGPGTSTPESGSASPGTSTPESGSASPGSTSESPSGTAPGSTSESPSGTAPGTSTPESGSASPGSTSESPSGTAPGSTSESPSGTAPGTSTPESGSASPGTSPSGESSTAPGSTSSTAESPGPGTSPSGESSTAPGSTSSTAESPGPGTSTPESGSASPGSTSESPSGTAPGSTSSTAESPGPGTSTPESGSASPGTSTPESGSASP

SEQ ID NO: 1095 - protein, 859 aa, Artificial Sequence
  Description of Artificial Sequence: Synthetic polypeptide
GLSKGCFGLKLDRIGSMSGLGCGGSSESGSSEGGPGSSESGSSEGGPGESPGGSSGSESGSGGEPSESGSSGESPGGSSGSESGESPGGSSGSESGSSESGSSEGGPGSSESGSSEGGPGSSESGSSEGGPGESPGGSSGSESGESPGGSSGSESGESPGGSSGSESGSSESGSSEGGPGSSESGSSEGGPGSSESGSSEGGPGSSESGSSEGGPGSSESGSSEGGPGSSESGSSEGGPGSGGEPSESGSSGESPGGSSGSESGESPGGSSGSESGSGGEPSESGSSGSEGSSGPGESSGSSESGSSEGGPGSGGEPSESGSSGSEGSSGPGESSGSSESGSSEGGPGSGGEPSESGSSGESPGGSSGSESGSGGEPSESGSSGSGGEPSESGSSGSSESGSSEGGPGSGGEPSESGSSGSGGEPSESGSSGSEGSSGPGESSGESPGGSSGSESGSEGSSGPGESSGSEGSSGPGESSGSGGEPSESGSSGSSESGSSEGGPGSSESGSSEGGPGESPGGSSGSESGSGGEPSESGSSGSEGSSGPGESSGESPGGSSGSESGSEGSSGPGSSESGSSEGGPGSGGEPSESGSSGSEGSSGPGESSGSEGSSGPGESSGSEGSSGPGESSGSGGEPSESGSSGSGGEPSESGSSGESPGGSSGSESGESPGGSSGSESGSGGEPSESGSSGSEGSSGPGESSGESPGGSSGSESGSSESGSSEGGPGSSESGSSEGGPGSSESGSSEGGPGSGGEPSESGSSGSSESGSSEGGPGESPGGSSGSESGSGGEPSESGSSGSSESGSSEGGPGESPGGSSGSESGSGGEPSESGSSGESPGGSSGSESGSGGEPSESGSS

SEQ ID NO: 1096 - protein, 887 aa, Artificial Sequence
  Description of Artificial Sequence: Synthetic polypeptide
GLSKGCFGLKLDRIGSMSGLGCGGSPAGSPTSTEEGTSESATPESGPGTSTEPSEGSAPGSPAGSPTSTEEGTSTEPSEGSAPGTSTEPSEGSAPGTSESATPESGPGSEPATSGSETPGSEPATSGSETPGSPAGSPTSTEEGTSESATPESGPGTSTEPSEGSAPGTSTEPSEGSAPGSPAGSPTSTEEGTSTEPSEGSAPGTSTEPSEGSAPGTSESATPESGPGTSTEPSEGSAPGTSESATPESGPGSEPATSGSETPGTSTEPSEGSAPGTSTEPSEGSAPGTSESATPESGPGTSESATPESGPGSPAGSPTSTEEGTSESATPESGPGSEPATSGSETPGTSESATPESGPGTSTEPSEGSAPGTSTEPSEGSAPGTSTEPSEGSAPGTSTEPSEGSAPGTSTEPSEGSAPGTSTEPSEGSAPGSPAGSPTSTEEGTSTEPSEGSAPGTSESATPESGPGSEPATSGSETPGTSESATPESGPGSEPATSGSETPGTSESATPESGPGTSTEPSEGSAPGTSESATPESGPGSPAGSPTSTEEGSPAGSPTSTEEGSPAGSPTSTEEGTSESATPESGPGTSTEPSEGSAPGTSESATPESGPGSEPATSGSETPGTSESATPESGPGSEPATSGSETPGTSESATPESGPGTSTEPSEGSAPGSPAGSPTSTEEGTSESATPESGPGSEPATSGSETPGTSESATPESGPGSPAGSPTSTEEGSPAGSPTSTEEGTSTEPSEGSAPGTSESATPESGPGTSESATPESGPGTSESATPESGPGSEPATSGSETPGSEPATSGSETPGSPAGSPTSTEEGTSTEPSEGSAPGTSTEPSEGSAPGSEPATSGSETPGTSESATPESGPGTSTEPSEGSAP

SEQ ID NO: 1097 - protein, 898 aa, Artificial Sequence
  Description of Artificial Sequence: Synthetic polypeptide
  MOD_RES (453)..(455): Any amino acid
  MOD_RES (466)..(469): Any amino acid
GLSKGCFGLKLDRIGSMSGLGCGGSTSESPSGTAPGTSPSGESSTAPGSTSESPSGTAPGSTSESPSGTAPGTSTPESGSASPGTSTPESGSASPGSTSESPSGTAPGSTSESPSGTAPGTSPSGESSTAPGSTSESPSGTAPGTSPSGESSTAPGTSPSGESSTAPGSTSSTAESPGPGTSPSGESSTAPGTSPSGESSTAPGSTSSTAESPGPGTSTPESGSASPGTSTPESGSASPGSTSESPSGTAPGSTSESPSGTAPGTSTPESGSASPGSTSSTAESPGPGTSTPESGSASPGSTSESPSGTAPGTSPSGESSTAPGSTSSTAESPGPGTSPSGESSTAPGTSTPESGSASPGSTSSTAESPGPGSTSSTAESPGPGSTSSTAESPGPGSTSSTAESPGPGTSPSGESSTAPGSTSESPSGTAPGSTSESPSGTAPGTSTPESGPXXXGASASGAPSTXXXXSESPSGTAPGSTSESPSGTAPGSTSESPSGTAPGSTSESPSGTAPGSTSESPSGTAPGSTSESPSGTAPGTSTPESGSASPGTSPSGESSTAPGTSPSGESSTAPGSTSSTAESPGPGTSPSGESSTAPGTSTPESGSASPGSTSESPSGTAPGSTSESPSGTAPGTSPSGESSTAPGSTSESPSGTAPGTSTPESGSASPGTSTPESGSASPGSTSESPSGTAPGTSTPESGSASPGSTSSTAESPGPGSTSESPSGTAPGSTSESPSGTAPGTSPSGESSTAPGSTSSTAESPGPGTSPSGESSTAPGTSTPESGSASPGTSPSGESSTAPGTSPSGESSTAPGTSPSGESSTAPGSTSSTAESPGPGSTSSTAESPGPGTSPSGESSTAPGSSPSASTGTGPGSSTPSGATGSPGSSTPSGATGSP

SEQ ID NO: 1098 - protein, 887 aa, Artificial Sequence
  Description of Artificial Sequence: Synthetic polypeptide
GLSKGCFGLKLDRIGSMSGLGCGGASPGTSSTGSPGSSPSASTGTGPGSSPSASTGTGPGTPGSGTASSSPGSSTPSGATGSPGSNPSASTGTGPGASPGTSSTGSPGTPGSGTASSSPGSSTPSGATGSPGTPGSGTASSSPGASPGTSSTGSPGASPGTSSTGSPGTPGSGTASSSPGSSTPSGATGSPGASPGTSSTGSPGTPGSGTASSSPGSSTPSGATGSPGSNPSASTGTGPGSSPSASTGTGPGSSTPSGATGSPGSSTPSGATGSPGASPGTSSTGSPGASPGTSSTGSPGASPGTSSTGSPGTPGSGTASSSPGASPGTSSTGSPGASPGTSSTGSPGASPGTSSTGSPGSSPSASTGTGPGTPGSGTASSSPGASPGTSSTGSPGASPGTSSTGSPGASPGTSSTGSPGSSTPSGATGSPGSSTPSGATGSPGASPGTSSTGSPGTPGSGTASSSPGSSTPSGATGSPGSSTPSGATGSPGSSTPSGATGSPGSSPSASTGTGPGASPGTSSTGSPGASPGTSSTGSPGTPGSGTASSSPGASPGTSSTGSPGASPGTSSTGSPGASPGTSSTGSPGASPGTSSTGSPGTPGSGTASSSPGSSTPSGATGSPGTPGSGTASSSPGSSTPSGATGSPGTPGSGTASSSPGSSTPSGATGSPGSSTPSGATGSPGSSPSASTGTGPGSSPSASTGTGPGASPGTSSTGSPGTPGSGTASSSPGSSTPSGATGSPGSSPSASTGTGPGSSPSASTGTGPGASPGTSSTGSPGASPGTSSTGSPGSSTPSGATGSPGSSPSASTGTGPGASPGTSSTGSPGSSPSASTGTGPGTPGSGTASSSPGSSTPSGATGSPGSSTPSGATGSPGASPGTSSTGSP

SEQ ID NO: 1099 - protein, 898 aa, Artificial Sequence
  Description of Artificial Sequence: Synthetic polypeptide
GLSKGCFGLKLDRIGSMSGLGCGGTSTEPSEGSAPGSEPATSGSETPGSPAGSPTSTEEGSTSSTAESPGPGTSTPESGSASPGSTSESPSGTAPGSTSESPSGTAPGTSTPESGSASPGTSTPESGSASPGSEPATSGSETPGTSESATPESGPGSPAGSPTSTEEGTSTEPSEGSAPGTSESATPESGPGTSTEPSEGSAPGTSTEPSEGSAPGSPAGSPTSTEEGTSTEPSEGSAPGTSTEPSEGSAPGTSESATPESGPGTSESATPESGPGTSTEPSEGSAPGTSTEPSEGSAPGTSESATPESGPGTSTEPSEGSAPGSEPATSGSETPGSPAGSPTSTEEGSSTPSGATGSPGTPGSGTASSSPGSSTPSGATGSPGTSTEPSEGSAPGTSTEPSEGSAPGSEPATSGSETPGSPAGSPTSTEEGSPAGSPTSTEEGTSTEPSEGSAPGASASGAPSTGGTSESATPESGPGSPAGSPTSTEEGSPAGSPTSTEEGSTSSTAESPGPGSTSESPSGTAPGTSPSGESSTAPGTPGSGTASSSPGSSTPSGATGSPGSSPSASTGTGPGSEPATSGSETPGTSESATPESGPGSEPATSGSETPGSTSSTAESPGPGSTSSTAESPGPGTSPSGESSTAPGSEPATSGSETPGSEPATSGSETPGTSTEPSEGSAPGSTSSTAESPGPGTSTPESGSASPGSTSESPSGTAPGTSTEPSEGSAPGTSTEPSEGSAPGTSTEPSEGSAPGSSTPSGATGSPGSSPSASTGTGPGASPGTSSTGSPGSEPATSGSETPGTSESATPESGPGSPAGSPTSTEEGSSTPSGATGSPGSSPSASTGTGPGASPGTSSTGSPGTSESATPESGPGTSTEPSEGSAPGTSTEPSEGSAP

SEQ ID NO: 1100 - protein, 1341 aa, Artificial Sequence
  Description of Artificial Sequence: Synthetic polypeptide
GLSKGCFGLKLDRIGSMSGLGCGGTSTEPSEGSAPGSEPATSGSETPGSPAGSPTSTEEGSTSSTAESPGPGTSTPESGSASPGSTSESPSGTAPGSTSESPSGTAPGTSTPESGSASPGTSTPESGSASPGSEPATSGSETPGTSESATPESGPGSPAGSPTSTEEGTSTEPSEGSAPGTSESATPESGPGTSTEPSEGSAPGTSTEPSEGSAPGSPAGSPTSTEEGTSTEPSEGSAPGTSTEPSEGSAPGTSESATPESGPGTSESATPESGPGTSTEPSEGSAPGTSTEPSEGSAPGTSESATPESGPGTSTEPSEGSAPGSEPATSGSETPGSPAGSPTSTEEGSSTPSGATGSPGTPGSGTASSSPGSSTPSGATGSPGTSTEPSEGSAPGTSTEPSEGSAPGSEPATSGSETPGSPAGSPTSTEEGSPAGSPTSTEEGTSTEPSEGSAPGPEPTGPAPSGGSEPATSGSETPGTSESATPESGPGSPAGSPTSTEEGTSESATPESGPGSPAGSPTSTEEGSPAGSPTSTEEGTSESATPESGPGSPAGSPTSTEEGSPAGSPTSTEEGSTSSTAESPGPGSTSESPSGTAPGTSPSGESSTAPGSTSESPSGTAPGSTSESPSGTAPGTSPSGESSTAPGTSTEPSEGSAPGTSESATPESGPGTSESATPESGPGSEPATSGSETPGTSESATPESGPGTSESATPESGPGTSTEPSEGSAPGTSESATPESGPGTSTEPSEGSAPGTSPSGESSTAPGTSPSGESSTAPGTSPSGESSTAPGTSTEPSEGSAPGSPAGSPTSTEEGTSTEPSEGSAPGSSPSASTGTGPGSSTPSGATGSPGSSTPSGATGSPGSSTPSGATGSPGSSTPSGATGSPGASPGTSSTGSPGASASGAPSTGGTSPSGESSTAPGSTSSTAESPGPGTSPSGESSTAPGTSESATPESGPGTSTEPSEGSAPGTSTEPSEGSAPGSSPSASTGTGPGSSTPSGATGSPGASPGTSSTGSPGTSTPESGSASPGTSPSGESSTAPGTSPSGESSTAPGTSESATPESGPGSEPATSGSETPGTSTEPSEGSAPGSTSESPSGTAPGSTSESPSGTAPGTSTPESGSASPGSPAGSPTSTEEGTSESATPESGPGTSTEPSEGSAPGSPAGSPTSTEEGTSESATPESGPGSEPATSGSETPGSSTPSGATGSPGASPGTSSTGSPGSSTPSGATGSPGSTSESPSGTAPGTSPSGESSTAPGSTSSTAESPGPGSSTPSGATGSPGASPGTSSTGSPGTPGSGTASSSPGSPAGSPTSTEEGSPAGSPTSTEEGTSTEPSEGSAP

SEQ ID NO: 1101 - protein, 936 aa, Artificial Sequence
  Description of Artificial Sequence: Synthetic polypeptide
MAEPAGSPTSTEEGTPGSGTASSSPGSSTPSGATGSPGASPGTSSTGSPGSPAGSPTSTEEGTSESATPESGPGTSTEPSEGSAPGSPAGSPTSTEEGTSTEPSEGSAPGTSTEPSEGSAPGTSESATPESGPGSEPATSGSETPGSEPATSGSETPGSPAGSPTSTEEGTSESATPESGPGTSTEPSEGSAPGTSTEPSEGSAPGSPAGSPTSTEEGTSTEPSEGSAPGTSTEPSEGSAPGTSESATPESGPGTSTEPSEGSAPGTSESATPESGPGSEPATSGSETPGTSTEPSEGSAPGTSTEPSEGSAPGTSESATPESGPGTSESATPESGPGSPAGSPTSTEEGTSESATPESGPGSEPATSGSETPGTSESATPESGPGTSTEPSEGSAPGTSTEPSEGSAPGTSTEPSEGSAPGTSTEPSEGSAPGTSTEPSEGSAPGTSTEPSEGSAPGSPAGSPTSTEEGTSTEPSEGSAPGTSESATPESGPGSEPATSGSETPGTSESATPESGPGSEPATSGSETPGTSESATPESGPGTSTEPSEGSAPGTSESATPESGPGSPAGSPTSTEEGSPAGSPTSTEEGSPAGSPTSTEEGTSESATPESGPGTSTEPSEGSAPGTSESATPESGPGSEPATSGSETPGTSESATPESGPGSEPATSGSETPGTSESATPESGPGTSTEPSEGSAPGSPAGSPTSTEEGTSESATPESGPGSEPATSGSETPGTSESATPESGPGSPAGSPTSTEEGSPAGSPTSTEEGTSTEPSEGSAPGTSESATPESGPGTSESATPESGPGTSESATPESGPGSEPATSGSETPGSEPATSGSETPGSPAGSPTSTEEGTSTEPSEGSAPGTSTEPSEGSAPGSEPATSGSETPGTSESATPESGPGTSTEPSEGSAPGGLSKGCFGLKLDRIGSMSGLGC

SEQ ID NO: 1102 - protein, 947 aa, Artificial Sequence
  Description of Artificial Sequence: Synthetic polypeptide
MAEPAGSPTSTEEGASPGTSSTGSPGSSTPSGATGSPGSSTPSGATGSPGTSTEPSEGSAPGSEPATSGSETPGSPAGSPTSTEEGSTSSTAESPGPGTSTPESGSASPGSTSESPSGTAPGSTSESPSGTAPGTSTPESGSASPGTSTPESGSASPGSEPATSGSETPGTSESATPESGPGSPAGSPTSTEEGTSTEPSEGSAPGTSESATPESGPGTSTEPSEGSAPGTSTEPSEGSAPGSPAGSPTSTEEGTSTEPSEGSAPGTSTEPSEGSAPGTSESATPESGPGTSESATPESGPGTSTEPSEGSAPGTSTEPSEGSAPGTSESATPESGPGTSTEPSEGSAPGSEPATSGSETPGSPAGSPTSTEEGSSTPSGATGSPGTPGSGTASSSPGSSTPSGATGSPGTSTEPSEGSAPGTSTEPSEGSAPGSEPATSGSETPGSPAGSPTSTEEGSPAGSPTSTEEGTSTEPSEGSAPGASASGAPSTGGTSESATPESGPGSPAGSPTSTEEGSPAGSPTSTEEGSTSSTAESPGPGSTSESPSGTAPGTSPSGESSTAPGTPGSGTASSSPGSSTPSGATGSPGSSPSASTGTGPGSEPATSGSETPGTSESATPESGPGSEPATSGSETPGSTSSTAESPGPGSTSSTAESPGPGTSPSGESSTAPGSEPATSGSETPGSEPATSGSETPGTSTEPSEGSAPGSTSSTAESPGPGTSTPESGSASPGSTSESPSGTAPGTSTEPSEGSAPGTSTEPSEGSAPGTSTEPSEGSAPGSSTPSGATGSPGSSPSASTGTGPGASPGTSSTGSPGSEPATSGSETPGTSESATPESGPGSPAGSPTSTEEGSSTPSGATGSPGSSPSASTGTGPGASPGTSSTGSPGTSESATPESGPGTSTEPSEGSAPGTSTEPSEGSAPGGLSKGCFGLKLDRIGSMSGLGC

SEQ ID NO: 1103 - protein, 167 aa, Artificial Sequence
  Description of Artificial Sequence: Synthetic polypeptide
GSEPATSGSETPGTSESATPESGPGSEPATSGSETPGSPAGSPTSTEEGTSTEPSEGSAPGSEPATSGSETPGSEPATSGSETPGSEPATSGSETPGTSTEPSEGSAPGTSESATPESGPGSEPATSGSETPGTSTEPSEGSAPGGLSKGCFGLKLDRIGSMSGLGC

SEQ ID NO: 1104 - protein, 167 aa, Artificial Sequence
  Description of Artificial Sequence: Synthetic polypeptide
GTSTPESGSASPGTSPSGESSTAPGTSPSGESSTAPGSTSSTAESPGPGSTSESPSGTAPGSTSSTAESPGPGTSPSGESSTAPGTSTPESGSASPGSTSSTAESPGPGTSPSGESSTAPGTSPSGESSTAPGTSPSGESSTAPGGLSKGCFGLKLDRIGSMSGLGC

SEQ ID NO: 1105 - protein, 311 aa, Artificial Sequence
  Description of Artificial Sequence: Synthetic polypeptide
GTSESATPESGPGSEPATSGSETPGTSESATPESGPGSEPATSGSETPGTSESATPESGPGTSTEPSEGSAPGSPAGSPTSTEEGTSESATPESGPGSEPATSGSETPGTSESATPESGPGSPAGSPTSTEEGSPAGSPTSTEEGTSTEPSEGSAPGTSESATPESGPGTSESATPESGPGTSESATPESGPGSEPATSGSETPGSEPATSGSETPGSPAGSPTSTEEGTSTEPSEGSAPGTSTEPSEGSAPGSEPATSGSETPGTSESATPESGPGTSTEPSEGSAPGGLSKGCFGLKLDRIGSMSGLGC

SEQ ID NO: 1106 - protein, 599 aa, Artificial Sequence
  Description of Artificial Sequence: Synthetic polypeptide
GSPAGSPTSTEEGTSESATPESGPGTSTEPSEGSAPGSPAGSPTSTEEGTSTEPSEGSAPGTSTEPSEGSAPGTSESATPESGPGSEPATSGSETPGSEPATSGSETPGSPAGSPTSTEEGTSESATPESGPGTSTEPSEGSAPGTSTEPSEGSAPGSPAGSPTSTEEGTSTEPSEGSAPGTSTEPSEGSAPGTSESATPESGPGTSTEPSEGSAPGTSESATPESGPGSEPATSGSETPGTSTEPSEGSAPGTSTEPSEGSAPGTSESATPESGPGTSESATPESGPGSPAGSPTSTEEGTSESATPESGPGSEPATSGSETPGTSESATPESGPGTSTEPSEGSAPGTSTEPSEGSAPGTSTEPSEGSAPGTSTEPSEGSAPGTSTEPSEGSAPGTSTEPSEGSAPGSPAGSPTSTEEGTSTEPSEGSAPGTSESATPESGPGSEPATSGSETPGTSESATPESGPGSEPATSGSETPGTSESATPESGPGTSTEPSEGSAPGTSESATPESGPGSPAGSPTSTEEGSPAGSPTSTEEGSPAGSPTSTEEGTSESATPESGPGTSTEPSEGSAPGGLSKGCFGLKLDRIGSMSGLGC

SEQ ID NO: 1107 - protein, 599 aa, Artificial Sequence
  Description of Artificial Sequence: Synthetic polypeptide
GSTSSTAESPGPGSTSSTAESPGPGSTSESPSGTAPGSTSSTAESPGPGSTSSTAESPGPGTSTPESGSASPGSTSESPSGTAPGTSPSGESSTAPGSTSESPSGTAPGSTSESPSGTAPGTSPSGESSTAPGSTSESPSGTAPGSTSESPSGTAPGTSPSGESSTAPGSTSESPSGTAPGSTSESPSGTAPGSTSESPSGTAPGTSTPESGSASPGSTSESPSGTAPGTSTPESGSASPGSTSSTAESPGPGSTSSTAESPGPGTSTPESGSASPGTSTPESGSASPGSTSESPSGTAPGTSTPESGSASPGTSTPESGSASPGSTSESPSGTAPGSTSESPSGTAPGSTSESPSGTAPGSTSSTAESPGPGTSTPESGSASPGTSTPESGSASPGSTSESPSGTAPGSTSESPSGTAPGTSTPESGSASPGSTSESPSGTAPGSTSESPSGTAPGTSTPESGSASPGTSPSGESSTAPGSTSSTAESPGPGTSPSGESSTAPGSTSSTAESPGPGTSTPESGSASPGSTSESPSGTAPGSTSSTAESPGPGTSTPESGSASPGTSTPESGSASPGGLSKGCFGLKLDRIGSMSGLGC

SEQ ID NO: 1108 - protein, 859 aa, Artificial Sequence
  Description of Artificial Sequence: Synthetic polypeptide
GSSESGSSEGGPGSSESGSSEGGPGESPGGSSGSESGSGGEPSESGSSGESPGGSSGSESGESPGGSSGSESGSSESGSSEGGPGSSESGSSEGGPGSSESGSSEGGPGESPGGSSGSESGESPGGSSGSESGESPGGSSGSESGSSESGSSEGGPGSSESGSSEGGPGSSESGSSEGGPGSSESGSSEGGPGSSESGSSEGGPGSSESGSSEGGPGSGGEPSESGSSGESPGGSSGSESGESPGGSSGSESGSGGEPSESGSSGSEGSSGPGESSGSSESGSSEGGPGSGGEPSESGSSGSEGSSGPGESSGSSESGSSEGGPGSGGEPSESGSSGESPGGSSGSESGSGGEPSESGSSGSGGEPSESGSSGSSESGSSEGGPGSGGEPSESGSSGSGGEPSESGSSGSEGSSGPGESSGESPGGSSGSESGSEGSSGPGESSGSEGSSGPGESSGSGGEPSESGSSGSSESGSSEGGPGSSESGSSEGGPGESPGGSSGSESGSGGEPSESGSSGSEGSSGPGESSGESPGGSSGSESGSEGSSGPGSSESGSSEGGPGSGGEPSESGSSGSEGSSGPGESSGSEGSSGPGESSGSEGSSGPGESSGSGGEPSESGSSGSGGEPSESGSSGESPGGSSGSESGESPGGSSGSESGSGGEPSESGSSGSEGSSGPGESSGESPGGSSGSESGSSESGSSEGGPGSSESGSSEGGPGSSESGSSEGGPGSGGEPSESGSSGSSESGSSEGGPGESPGGSSGSESGSGGEPSESGSSGSSESGSSEGGPGESPGGSSGSESGSGGEPSESGSSGESPGGSSGSESGSGGEPSESGSSGGLSKGCFGLKLDRIGSMSGLGC

SEQ ID NO: 1109 - protein, 887 aa, Artificial Sequence
  Description of Artificial Sequence: Synthetic polypeptide
GSPAGSPTSTEEGTSESATPESGPGTSTEPSEGSAPGSPAGSPTSTEEGTSTEPSEGSAPGTSTEPSEGSAPGTSESATPESGPGSEPATSGSETPGSEPATSGSETPGSPAGSPTSTEEGTSESATPESGPGTSTEPSEGSAPGTSTEPSEGSAPGSPAGSPTSTEEGTSTEPSEGSAPGTSTEPSEGSAPGTSESATPESGPGTSTEPSEGSAPGTSESATPESGPGSEPATSGSETPGTSTEPSEGSAPGTSTEPSEGSAPGTSESATPESGPGTSESATPESGPGSPAGSPTSTEEGTSESATPESGPGSEPATSGSETPGTSESATPESGPGTSTEPSEGSAPGTSTEPSEGSAPGTSTEPSEGSAPGTSTEPSEGSAPGTSTEPSEGSAPGTSTEPSEGSAPGSPAGSPTSTEEGTSTEPSEGSAPGTSESATPESGPGSEPATSGSETPGTSESATPESGPGSEPATSGSETPGTSESATPESGPGTSTEPSEGSAPGTSESATPESGPGSPAGSPTSTEEGSPAGSPTSTEEGSPAGSPTSTEEGTSESATPESGPGTSTEPSEGSAPGTSESATPESGPGSEPATSGSETPGTSESATPESGPGSEPATSGSETPGTSESATPESGPGTSTEPSEGSAPGSPAGSPTSTEEGTSESATPESGPGSEPATSGSETPGTSESATPESGPGSPAGSPTSTEEGSPAGSPTSTEEGTSTEPSEGSAPGTSESATPESGPGTSESATPESGPGTSESATPESGPGSEPATSGSETPGSEPATSGSETPGSPAGSPTSTEEGTSTEPSEGSAPGTSTEPSEGSAPGSEPATSGSETPGTSESATPESGPGTSTEPSEGSAPGGLSKGCFGLKLDRIGSMSGLGC

SEQ ID NO: 1110 - protein, 898 aa, Artificial Sequence
  Description of Artificial Sequence: Synthetic polypeptide
  MOD_RES (430)..(432): Any amino acid
  MOD_RES (443)..(446): Any amino acid
GSTSESPSGTAPGTSPSGESSTAPGSTSESPSGTAPGSTSESPSGTAPGTSTPESGSASPGTSTPESGSASPGSTSESPSGTAPGSTSESPSGTAPGTSPSGESSTAPGSTSESPSGTAPGTSPSGESSTAPGTSPSGESSTAPGSTSSTAESPGPGTSPSGESSTAPGTSPSGESSTAPGSTSSTAESPGPGTSTPESGSASPGTSTPESGSASPGSTSESPSGTAPGSTSESPSGTAPGTSTPESGSASPGSTSSTAESPGPGTSTPESGSASPGSTSESPSGTAPGTSPSGESSTAPGSTSSTAESPGPGTSPSGESSTAPGTSTPESGSASPGSTSSTAESPGPGSTSSTAESPGPGSTSSTAESPGPGSTSSTAESPGPGTSPSGESSTAPGSTSESPSGTAPGSTSESPSGTAPGTSTPESGPXXXGASASGAPSTXXXXSESPSGTAPGSTSESPSGTAPGSTSESPSGTAPGSTSESPSGTAPGSTSESPSGTAPGSTSESPSGTAPGTSTPESGSASPGTSPSGESSTAPGTSPSGESSTAPGSTSSTAESPGPGTSPSGESSTAPGTSTPESGSASPGSTSESPSGTAPGSTSESPSGTAPGTSPSGESSTAPGSTSESPSGTAPGTSTPESGSASPGTSTPESGSASPGSTSESPSGTAPGTSTPESGSASPGSTSSTAESPGPGSTSESPSGTAPGSTSESPSGTAPGTSPSGESSTAPGSTSSTAESPGPGTSPSGESSTAPGTSTPESGSASPGTSPSGESSTAPGTSPSGESSTAPGTSPSGESSTAPGSTSSTAESPGPGSTSSTAESPGPGTSPSGESSTAPGSSPSASTGTGPGSSTPSGATGSPGSSTPSGATGSPGGLSKGCFGLKLDRIGSMSGLGC

SEQ ID NO: 1111 - protein, 887 aa, Artificial Sequence
  Description of Artificial Sequence: Synthetic polypeptide
GASPGTSSTGSPGSSPSASTGTGPGSSPSASTGTGPGTPGSGTASSSPGSSTPSGATGSPGSNPSASTGTGPGASPGTSSTGSPGTPGSGTASSSPGSSTPSGATGSPGTPGSGTASSSPGASPGTSSTGSPGASPGTSSTGSPGTPGSGTASSSPGSSTPSGATGSPGASPGTSSTGSPGTPGSGTASSSPGSSTPSGATGSPGSNPSASTGTGPGSSPSASTGTGPGSSTPSGATGSPGSSTPSGATGSPGASPGTSSTGSPGASPGTSSTGSPGASPGTSSTGSPGTPGSGTASSSPGASPGTSSTGSPGASPGTSSTGSPGASPGTSSTGSPGSSPSASTGTGPGTPGSGTASSSPGASPGTSSTGSPGASPGTSSTGSPGASPGTSSTGSPGSSTPSGATGSPGSSTPSGATGSPGASPGTSSTGSPGTPGSGTASSSPGSSTPSGATGSPGSSTPSGATGSPGSSTPSGATGSPGSSPSASTGTGPGASPGTSSTGSPGASPGTSSTGSPGTPGSGTASSSPGASPGTSSTGSPGASPGTSSTGSPGASPGTSSTGSPGASPGTSSTGSPGTPGSGTASSSPGSSTPSGATGSPGTPGSGTASSSPGSSTPSGATGSPGTPGSGTASSSPGSSTPSGATGSPGSSTPSGATGSPGSSPSASTGTGPGSSPSASTGTGPGASPGTSSTGSPGTPGSGTASSSPGSSTPSGATGSPGSSPSASTGTGPGSSPSASTGTGPGASPGTSSTGSPGASPGTSSTGSPGSSTPSGATGSPGSSPSASTGTGPGASPGTSSTGSPGSSPSASTGTGPGTPGSGTASSSPGSSTPSGATGSPGSSTPSGATGSPGASPGTSSTGSPGGLSKGCFGLKLDRIGSMSGLGC

SEQ ID NO: 1112 - protein, 898 aa, Artificial Sequence
  Description of Artificial Sequence: Synthetic polypeptide
GTSTEPSEGSAPGSEPATSGSETPGSPAGSPTSTEEGSTSSTAESPGPGTSTPESGSASPGSTSESPSGTAPGSTSESPSGTAPGTSTPESGSASPGTSTPESGSASPGSEPATSGSETPGTSESATPESGPGSPAGSPTSTEEGTSTEPSEGSAPGTSESATPESGPGTSTEPSEGSAPGTSTEPSEGSAPGSPAGSPTSTEEGTSTEPSEGSAPGTSTEPSEGSAPGTSESATPESGPGTSESATPESGPGTSTEPSEGSAPGTSTEPSEGSAPGTSESATPESGPGTSTEPSEGSAPGSEPATSGSETPGSPAGSPTSTEEGSSTPSGATGSPGTPGSGTASSSPGSSTPSGATGSPGTSTEPSEGSAPGTSTEPSEGSAPGSEPATSGSETPGSPAGSPTSTEEGSPAGSPTSTEEGTSTEPSEGSAPGASASGAPSTGGTSESATPESGPGSPAGSPTSTEEGSPAGSPTSTEEGSTSSTAESPGPGSTSESPSGTAPGTSPSGESSTAPGTPGSGTASSSPGSSTPSGATGSPGSSPSASTGTGPGSEPATSGSETPGTSESATPESGPGSEPATSGSETPGSTSSTAESPGPGSTSSTAESPGPGTSPSGESSTAPGSEPATSGSETPGSEPATSGSETPGTSTEPSEGSAPGSTSSTAESPGPGTSTPESGSASPGSTSESPSGTAPGTSTEPSEGSAPGTSTEPSEGSAPGTSTEPSEGSAPGSSTPSGATGSPGSSPSASTGTGPGASPGTSSTGSPGSEPATSGSETPGTSESATPESGPGSPAGSPTSTEEGSSTPSGATGSPGSSPSASTGTGPGASPGTSSTGSPGTSESATPESGPGTSTEPSEGSAPGTSTEPSEGSAPGGLSKGCFGLKLDRIGSMSGLGC

SEQ ID NO: 1113 - protein, 260 aa, Artificial Sequence
  Description of Artificial Sequence: Synthetic polypeptide
MNSGVCLCVLMAVLAAGALTQPVPPADPAGSGLQRAEEAPRRQLRVSQRTDGESRAHLGALLARYIQQARKAPSGRMSIVKNLQNLDPSHRISDRDYMGWMDFGRRSAEEYEYPSGGSEPATSGSETPGTSESATPESGPGSEPATSGSETPGSPAGSPTSTEEGTSTEPSEGSAPGSEPATSGSETPGSEPATSGSETPGSEPATSGSETPGTSTEPSEGSAPGTSESATPESGPGSEPATSGSETPGTSTEPSEGSAP

SEQ ID NO: 1114 - protein, 260 aa, Artificial Sequence
  Description of Artificial Sequence: Synthetic polypeptide
MNSGVCLCVLMAVLAAGALTQPVPPADPAGSGLQRAEEAPRRQLRVSQRTDGESRAHLGALLARYIQQARKAPSGRMSIVKNLQNLDPSHRISDRDYMGWMDFGRRSAEEYEYPSGGTSTPESGSASPGTSPSGESSTAPGTSPSGESSTAPGSTSSTAESPGPGSTSESPSGTAPGSTSSTAESPGPGTSPSGESSTAPGTSTPESGSASPGSTSSTAESPGPGTSPSGESSTAPGTSPSGESSTAPGTSPSGESSTAP

SEQ ID NO: 1115 - protein, 404 aa, Artificial Sequence
  Description of Artificial Sequence: Synthetic polypeptide
MNSGVCLCVLMAVLAAGALTQPVPPADPAGSGLQRAEEAPRRQLRVSQRTDGESRAHLGALLARYIQQARKAPSGRMSIVKNLQNLDPSHRISDRDYMGWMDFGRRSAEEYEYPSGGTSESATPESGPGSEPATSGSETPGTSESATPESGPGSEPATSGSETPGTSESATPESGPGTSTEPSEGSAPGSPAGSPTSTEEGTSESATPESGPGSEPATSGSETPGTSESATPESGPGSPAGSPTSTEEGSPAGSPTSTEEGTSTEPSEGSAPGTSESATPESGPGTSESATPESGPGTSESATPESGPGSEPATSGSETPGSEPATSGSETPGSPAGSPTSTEEGTSTEPSEGSAPGTSTEPSEGSAPGSEPATSGSETPGTSESATPESGPGTSTEPSEGSAP

SEQ ID NO: 1116 - protein, 692 aa, Artificial Sequence
  Description of Artificial Sequence: Synthetic polypeptide
MNSGVCLCVLMAVLAAGALTQPVPPADPAGSGLQRAEEAPRRQLRVSQRTDGESRAHLGALLARYIQQARKAPSGRMSIVKNLQNLDPSHRISDRDYMGWMDFGRRSAEEYEYPSGGSPAGSPTSTEEGTSESATPESGPGTSTEPSEGSAPGSPAGSPTSTEEGTSTEPSEGSAPGTSTEPSEGSAPGTSESATPESGPGSEPATSGSETPGSEPATSGSETPGSPAGSPTSTEEGTSESATPESGPGTSTEPSEGSAPGTSTEPSEGSAPGSPAGSPTSTEEGTSTEPSEGSAPGTSTEPSEGSAPGTSESATPESGPGTSTEPSEGSAPGTSESATPESGPGSEPATSGSETPGTSTEPSEGSAPGTSTEPSEGSAPGTSESATPESGPGTSESATPESGPGSPAGSPTSTEEGTSESATPESGPGSEPATSGSETPGTSESATPESGPGTSTEPSEGSAPGTSTEPSEGSAPGTSTEPSEGSAPGTSTEPSEGSAPGTSTEPSEGSAPGTSTEPSEGSAPGSPAGSPTSTEEGTSTEPSEGSAPGTSESATPESGPGSEPATSGSETPGTSESATPESGPGSEPATSGSETPGTSESATPESGPGTSTEPSEGSAPGTSESATPESGPGSPAGSPTSTEEGSPAGSPTSTEEGSPAGSPTSTEEGTSESATPESGPGTSTEPSEGSAP

SEQ ID NO: 1117 - protein, 692 aa, Artificial Sequence
  Description of Artificial Sequence: Synthetic polypeptide
MNSGVCLCVLMAVLAAGALTQPVPPADPAGSGLQRAEEAPRRQLRVSQRTDGESRAHLGALLARYIQQARKAPSGRMSIVKNLQNLDPSHRISDRDYMGWMDFGRRSAEEYEYPSGGSTSSTAESPGPGSTSSTAESPGPGSTSESPSGTAPGSTSSTAESPGPGSTSSTAESPGPGTSTPESGSASPGSTSESPSGTAPGTSPSGESSTAPGSTSESPSGTAPGSTSESPSGTAPGTSPSGESSTAPGSTSESPSGTAPGSTSESPSGTAPGTSPSGESSTAPGSTSESPSGTAPGSTSESPSGTAPGSTSESPSGTAPGTSTPESGSASPGSTSESPSGTAPGTSTPESGSASPGSTSSTAESPGPGSTSSTAESPGPGTSTPESGSASPGTSTPESGSASPGSTSESPSGTAPGTSTPESGSASPGTSTPESGSASPGSTSESPSGTAPGSTSESPSGTAPGSTSESPSGTAPGSTSSTAESPGPGTSTPESGSASPGTSTPESGSASPGSTSESPSGTAPGSTSESPSGTAPGTSTPESGSASPGSTSESPSGTAPGSTSESPSGTAPGTSTPESGSASPGTSPSGESSTAPGSTSSTAESPGPGTSPSGESSTAPGSTSSTAESPGPGTSTPESGSASPGSTSESPSGTAPGSTSSTAESPGPGTSTPESGSASPGTSTPESGSASP

SEQ ID NO: 1118 - protein, 952 aa, Artificial Sequence
  Description of Artificial Sequence: Synthetic polypeptide
MNSGVCLCVLMAVLAAGALTQPVPPADPAGSGLQRAEEAPRRQLRVSQRTDGESRAHLGALLARYIQQARKAPSGRMSIVKNLQNLDPSHRISDRDYMGWMDFGRRSAEEYEYPSGGSSESGSSEGGPGSSESGSSEGGPGESPGGSSGSESGSGGEPSESGSSGESPGGSSGSESGESPGGSSGSESGSSESGSSEGGPGSSESGSSEGGPGSSESGSSEGGPGESPGGSSGSESGESPGGSSGSESGESPGGSSGSESGSSESGSSEGGPGSSESGSSEGGPGSSESGSSEGGPGSSESGSSEGGPGSSESGSSEGGPGSSESGSSEGGPGSGGEPSESGSSGESPGGSSGSESGESPGGSSGSESGSGGEPSESGSSGSEGSSGPGESSGSSESGSSEGGPGSGGEPSESGSSGSEGSSGPGESSGSSESGSSEGGPGSGGEPSESGSSGESPGGSSGSESGSGGEPSESGSSGSGGEPSESGSSGSSESGSSEGGPGSGGEPSESGSSGSGGEPSESGSSGSEGSSGPGESSGESPGGSSGSESGSEGSSGPGESSGSEGSSGPGESSGSGGEPSESGSSGSSESGSSEGGPGSSESGSSEGGPGESPGGSSGSESGSGGEPSESGSSGSEGSSGPGESSGESPGGSSGSESGSEGSSGPGSSESGSSEGGPGSGGEPSESGSSGSEGSSGPGESSGSEGSSGPGESSGSEGSSGPGESSGSGGEPSESGSSGSGGEPSESGSSGESPGGSSGSESGESPGGSSGSESGSGGEPSESGSSGSEGSSGPGESSGESPGGSSGSESGSSESGSSEGGPGSSESGSSEGGPGSSESGSSEGGPGSGGEPSESGSSGSSESGSSEGGPGESPGGSSGSESGSGGEPSESGSSGSSESGSSEGGPGESPGGSSGSESGSGGEPSESGSSGESPGGSSGSESGSGGEPSESGSS

SEQ ID NO: 1119 - protein, 980 aa, Artificial Sequence
  Description of Artificial Sequence: Synthetic polypeptide
MNSGVCLCVLMAVLAAGALTQPVPPADPAGSGLQRAEEAPRRQLRVSQRTDGESRAHLGALLARYIQQARKAPSGRMSIVKNLQNLDPSHRISDRDYMGWMDFGRRSAEEYEYPSGGSPAGSPTSTEEGTSESATPESGPGTSTEPSEGSAPGSPAGSPTSTEEGTSTEPSEGSAPGTSTEPSEGSAPGTSESATPESGPGSEPATSGSETPGSEPATSGSETPGSPAGSPTSTEEGTSESATPESGPGTSTEPSEGSAPGTSTEPSEGSAPGSPAGSPTSTEEGTSTEPSEGSAPGTSTEPSEGSAPGTSESATPESGPGTSTEPSEGSAPGTSESATPESGPGSEPATSGSETPGTSTEPSEGSAPGTSTEPSEGSAPGTSESATPESGPGTSESATPESGPGSPAGSPTSTEEGTSESATPESGPGSEPATSGSETPGTSESATPESGPGTSTEPSEGSAPGTSTEPSEGSAPGTSTEPSEGSAPGTSTEPSEGSAPGTSTEPSEGSAPGTSTEPSEGSAPGSPAGSPTSTEEGTSTEPSEGSAPGTSESATPESGPGSEPATSGSETPGTSESATPESGPGSEPATSGSETPGTSESATPESGPGTSTEPSEGSAPGTSESATPESGPGSPAGSPTSTEEGSPAGSPTSTEEGSPAGSPTSTEEGTSESATPESGPGTSTEPSEGSAPGTSESATPESGPGSEPATSGSETPGTSESATPESGPGSEPATSGSETPGTSESATPESGPGTSTEPSEGSAPGSPAGSPTSTEEGTSESATPESGPGSEPATSGSETPGTSESATPESGPGSPAGSPTSTEEGSPAGSPTSTEEGTSTEPSEGSAPGTSESATPESGPGTSESATPESGPGTSESATPESGPGSEPATSGSETPGSEPATSGSETPGSPAGSPTSTEEGTSTEPSEGSAPGTSTEPSEGSAPGSEPATSGSETPGTSESATPESGPGTSTEPSEGSAP

SEQ ID NO: 1120 - protein, 991 aa, Artificial Sequence
  Description of Artificial Sequence: Synthetic polypeptide
  MOD_RES (546)..(548): Any amino acid
  MOD_RES (559)..(562): Any amino acid
MNSGVCLCVLMAVLAAGALTQPVPPADPAGSGLQRAEEAPRRQLRVSQRTDGESRAHLGALLARYIQQARKAPSGRMSIVKNLQNLDPSHRISDRDYMGWMDFGRRSAEEYEYPSGGSTSESPSGTAPGTSPSGESSTAPGSTSESPSGTAPGSTSESPSGTAPGTSTPESGSASPGTSTPESGSASPGSTSESPSGTAPGSTSESPSGTAPGTSPSGESSTAPGSTSESPSGTAPGTSPSGESSTAPGTSPSGESSTAPGSTSSTAESPGPGTSPSGESSTAPGTSPSGESSTAPGSTSSTAESPGPGTSTPESGSASPGTSTPESGSASPGSTSESPSGTAPGSTSESPSGTAPGTSTPESGSASPGSTSSTAESPGPGTSTPESGSASPGSTSESPSGTAPGTSPSGESSTAPGSTSSTAESPGPGTSPSGESSTAPGTSTPESGSASPGSTSSTAESPGPGSTSSTAESPGPGSTSSTAESPGPGSTSSTAESPGPGTSPSGESSTAPGSTSESPSGTAPGSTSESPSGTAPGTSTPESGPXXXGASASGAPSTXXXXSESPSGTAPGSTSESPSGTAPGSTSESPSGTAPGSTSESPSGTAPGSTSESPSGTAPGSTSESPSGTAPGTSTPESGSASPGTSPSGESSTAPGTSPSGESSTAPGSTSSTAESPGPGTSPSGESSTAPGTSTPESGSASPGSTSESPSGTAPGSTSESPSGTAPGTSPSGESSTAPGSTSESPSGTAPGTSTPESGSASPGTSTPESGSASPGSTSESPSGTAPGTSTPESGSASPGSTSSTAESPGPGSTSESPSGTAPGSTSESPSGTAPGTSPSGESSTAPGSTSSTAESPGPGTSPSGESSTAPGTSTPESGSASPGTSPSGESSTAPGTSPSGESSTAPGTSPSGESSTAPGSTSSTAESPGPGSTSSTAESPGPGTSPSGESSTAPGSSPSASTGTGPGSSTPSGATGSPGSSTPSGATGSP

SEQ ID NO: 1121 - protein, 980 aa, Artificial Sequence
  Description of Artificial Sequence: Synthetic polypeptide
MNSGVCLCVLMAVLAAGALTQPVPPADPAGSGLQRAEEAPRRQLRVSQRTDGESRAHLGALLARYIQQARKAPSGRMSIVKNLQNLDPSHRISDRDYMGWMDFGRRSAEEYEYPSGGASPGTSSTGSPGSSPSASTGTGPGSSPSASTGTGPGTPGSGTASSSPGSSTPSGATGSPGSNPSASTGTGPGASPGTSSTGSPGTPGSGTASSSPGSSTPSGATGSPGTPGSGTASSSPGASPGTSSTGSPGASPGTSSTGSPGTPGSGTASSSPGSSTPSGATGSPGASPGTSSTGSPGTPGSGTASSSPGSSTPSGATGSPGSNPSASTGTGPGSSPSASTGTGPGSSTPSGATGSPGSSTPSGATGSPGASPGTSSTGSPGASPGTSSTGSPGASPGTSSTGSPGTPGSGTASSSPGASPGTSSTGSPGASPGTSSTGSPGASPGTSSTGSPGSSPSASTGTGPGTPGSGTASSSPGASPGTSSTGSPGASPGTSSTGSPGASPGTSSTGSPGSSTPSGATGSPGSSTPSGATGSPGASPGTSSTGSPGTPGSGTASSSPGSSTPSGATGSPGSSTPSGATGSPGSSTPSGATGSPGSSPSASTGTGPGASPGTSSTGSPGASPGTSSTGSPGTPGSGTASSSPGASPGTSSTGSPGASPGTSSTGSPGASPGTSSTGSPGASPGTSSTGSPGTPGSGTASSSPGSSTPSGATGSPGTPGSGTASSSPGSSTPSGATGSPGTPGSGTASSSPGSSTPSGATGSPGSSTPSGATGSPGSSPSASTGTGPGSSPSASTGTGPGASPGTSSTGSPGTPGSGTASSSPGSSTPSGATGSPGSSPSASTGTGPGSSPSASTGTGPGASPGTSSTGSPGASPGTSSTGSPGSSTPSGATGSPGSSPSASTGTGPGASPGTSSTGSPGSSPSASTGTGPGTPGSGTASSSPGSSTPSGATGSPGSSTPSGATGSPGASPGTSSTGSP

SEQ ID NO: 1122 - protein, 991 aa, Artificial Sequence
  Description of Artificial Sequence: Synthetic polypeptide
MNSGVCLCVLMAVLAAGALTQPVPPADPAGSGLQRAEEAPRRQLRVSQRTDGESRAHLGALLARYIQQARKAPSGRMSIVKNLQNLDPSHRISDRDYMGWMDFGRRSAEEYEYPSGGTSTEPSEGSAPGSEPATSGSETPGSPAGSPTSTEEGSTSSTAESPGPGTSTPESGSASPGSTSESPSGTAPGSTSESPSGTAPGTSTPESGSASPGTSTPESGSASPGSEPATSGSETPGTSESATPESGPGSPAGSPTSTEEGTSTEPSEGSAPGTSESATPESGPGTSTEPSEGSAPGTSTEPSEGSAPGSPAGSPTSTEEGTSTEPSEGSAPGTSTEPSEGSAPGTSESATPESGPGTSESATPESGPGTSTEPSEGSAPGTSTEPSEGSAPGTSESATPESGPGTSTEPSEGSAPGSEPATSGSETPGSPAGSPTSTEEGSSTPSGATGSPGTPGSGTASSSPGSSTPSGATGSPGTSTEPSEGSAPGTSTEPSEGSAPGSEPATSGSETPGSPAGSPTSTEEGSPAGSPTSTEEGTSTEPSEGSAPGASASGAPSTGGTSESATPESGPGSPAGSPTSTEEGSPAGSPTSTEEGSTSSTAESPGPGSTSESPSGTAPGTSPSGESSTAPGTPGSGTASSSPGSSTPSGATGSPGSSPSASTGTGPGSEPATSGSETPGTSESATPESGPGSEPATSGSETPGSTSSTAESPGPGSTSSTAESPGPGTSPSGESSTAPGSEPATSGSETPGSEPATSGSETPGTSTEPSEGSAPGSTSSTAESPGPGTSTPESGSASPGSTSESPSGTAPGTSTEPSEGSAPGTSTEPSEGSAPGTSTEPSEGSAPGSSTPSGATGSPGSSPSASTGTGPGASPGTSSTGSPGSEPATSGSETPGTSESATPESGPGSPAGSPTSTEEGSSTPSGATGSPGSSPSASTGTGPGASPGTSSTGSPGTSESATPESGPGTSTEPSEGSAPGTSTEPSEGSAP

SEQ ID NO: 1123 - protein, 1434 aa, Artificial Sequence
  Description of Artificial Sequence: Synthetic polypeptide
MNSGVCLCVLMAVLAAGALTQPVPPADPAGSGLQRAEEAPRRQLRVSQRTDGESRAHLGALLARYIQQARKAPSGRMSIVKNLQNLDPSHRISDRDYMGWMDFGRRSAEEYEYPSGGTSTEPSEGSAPGSEPATSGSETPGSPAGSPTSTEEGSTSSTAESPGPGTSTPESGSASPGSTSESPSGTAPGSTSESPSGTAPGTSTPESGSASPGTSTPESGSASPGSEPATSGSETPGTSESATPESGPGSPAGSPTSTEEGTSTEPSEGSAPGTSESATPESGPGTSTEPSEGSAPGTSTEPSEGSAPGSPAGSPTSTEEGTSTEPSEGSAPGTSTEPSEGSAPGTSESATPESGPGTSESATPESGPGTSTEPSEGSAPGTSTEPSEGSAPGTSESATPESGPGTSTEPSEGSAPGSEPATSGSETPGSPAGSPTSTEEGSSTPSGATGSPGTPGSGTASSSPGSSTPSGATGSPGTSTEPSEGSAPGTSTEPSEGSAPGSEPATSGSETPGSPAGSPTSTEEGSPAGSPTSTEEGTSTEPSEGSAPGPEPTGPAPSGGSEPATSGSETPGTSESATPESGPGSPAGSPTSTEEGTSESATPESGPGSPAGSPTSTEEGSPAGSPTSTEEGTSESATPESGPGSPAGSPTSTEEGSPAGSPTSTEEGSTSSTAESPGPGSTSESPSGTAPGTSPSGESSTAPGSTSESPSGTAPGSTSESPSGTAPGTSPSGESSTAPGTSTEPSEGSAPGTSESATPESGPGTSESATPESGPGSEPATSGSETPGTSESATPESGPGTSESATPESGPGTSTEPSEGSAPGTSESATPESGPGTSTEPSEGSAPGTSPSGESSTAPGTSPSGESSTAPGTSPSGESSTAPGTSTEPSEGSAPGSPAGSPTSTEEGTSTEPSEGSAPGSSPSASTGTGPGSSTPSGATGSPGSSTPSGATGSPGSSTPSGATGSPGSSTPSGATGSPGASPGTSSTGSPGASASGAPSTGGTSPSGESSTAPGSTSSTAESPGPGTSPSGESSTAPGTSESATPESGPGTSTEPSEGSAPGTSTEPSEGSAPGSSPSASTGTGPGSSTPSGATGSPGASPGTSSTGSPGTSTPESGSASPGTSPSGESSTAPGTSPSGESSTAPGTSESATPESGPGSEPATSGSETPGTSTEPSEGSAPGSTSESPSGTAPGSTSESPSGTAPGTSTPESGSASPGSPAGSPTSTEEGTSESATPESGPGTSTEPSEGSAPGSPAGSPTSTEEGTSESATPESGPGSEPATSGSETPGSSTPSGATGSPGASPGTSSTGSPGSSTPSGATGSPGSTSESPSGTAPGTSPSGESSTAPGSTSSTAESPGPGSSTPSGATGSPGASPGTSSTGSPGTPGSGTASSSPGSPAGSPTSTEEGSPAGSPTSTEEGTSTEPSEGSAP

SEQ ID NO: 1124 - protein, 1029 aa, Artificial Sequence
  Description of Artificial Sequence: Synthetic polypeptide
MAEPAGSPTSTEEGTPGSGTASSSPGSSTPSGATGSPGASPGTSSTGSPGSPAGSPTSTEEGTSESATPESGPGTSTEPSEGSAPGSPAGSPTSTEEGTSTEPSEGSAPGTSTEPSEGSAPGTSESATPESGPGSEPATSGSETPGSEPATSGSETPGSPAGSPTSTEEGTSESATPESGPGTSTEPSEGSAPGTSTEPSEGSAPGSPAGSPTSTEEGTSTEPSEGSAPGTSTEPSEGSAPGTSESATPESGPGTSTEPSEGSAPGTSESATPESGPGSEPATSGSETPGTSTEPSEGSAPGTSTEPSEGSAPGTSESATPESGPGTSESATPESGPGSPAGSPTSTEEGTSESATPESGPGSEPATSGSETPGTSESATPESGPGTSTEPSEGSAPGTSTEPSEGSAPGTSTEPSEGSAPGTSTEPSEGSAPGTSTEPSEGSAPGTSTEPSEGSAPGSPAGSPTSTEEGTSTEPSEGSAPGTSESATPESGPGSEPATSGSETPGTSESATPESGPGSEPATSGSETPGTSESATPESGPGTSTEPSEGSAPGTSESATPESGPGSPAGSPTSTEEGSPAGSPTSTEEGSPAGSPTSTEEGTSESATPESGPGTSTEPSEGSAPGTSESATPESGPGSEPATSGSETPGTSESATPESGPGSEPATSGSETPGTSESATPESGPGTSTEPSEGSAPGSPAGSPTSTEEGTSESATPESGPGSEPATSGSETPGTSESATPESGPGSPAGSPTSTEEGSPAGSPTSTEEGTSTEPSEGSAPGTSESATPESGPGTSESATPESGPGTSESATPESGPGSEPATSGSETPGSEPATSGSETPGSPAGSPTSTEEGTSTEPSEGSAPGTSTEPSEGSAPGSEPATSGSETPGTSESATPESGPGTSTEPSEGSAPGMNSGVCLCVLMAVLAAGALTQPVPPADPAGSGLQRAEEAPRRQLRVSQRTDGESRAHLGALLARYIQQARKAPSGRMSIVKNLQNLDPSHRISDRDYMGWMDFGRRSAEEYEYPS

SEQ ID NO: 1125 - protein, 1040 aa, Artificial Sequence
  Description of Artificial Sequence: Synthetic polypeptide
MAEPAGSPTSTEEGASPGTSSTGSPGSSTPSGATGSPGSSTPSGATGSPGTSTEPSEGSAPGSEPATSGSETPGSPAGSPTSTEEGSTSSTAESPGPGTSTPESGSASPGSTSESPSGTAPGSTSESPSGTAPGTSTPESGSASPGTSTPESGSASPGSEPATSGSETPGTSESATPESGPGSPAGSPTSTEEGTSTEPSEGSAPGTSESATPESGPGTSTEPSEGSAPGTSTEPSEGSAPGSPAGSPTSTEEGTSTEPSEGSAPGTSTEPSEGSAPGTSESATPESGPGTSESATPESGPGTSTEPSEGSAPGTSTEPSEGSAPGTSESATPESGPGTSTEPSEGSAPGSEPATSGSETPGSPAGSPTSTEEGSSTPSGATGSPGTPGSGTASSSPGSSTPSGATGSPGTSTEPSEGSAPGTSTEPSEGSAPGSEPATSGSETPGSPAGSPTSTEEGSPAGSPTSTEEGTSTEPSEGSAPGASASGAPSTGGTSESATPESGPGSPAGSPTSTEEGSPAGSPTSTEEGSTSSTAESPGPGSTSESPSGTAPGTSPSGESSTAPGTPGSGTASSSPGSSTPSGATGSPGSSPSASTGTGPGSEPATSGSETPGTSESATPESGPGSEPATSGSETPGSTSSTAESPGPGSTSSTAESPGPGTSPSGESSTAPGSEPATSGSETPGSEPATSGSETPGTSTEPSEGSAPGSTSSTAESPGPGTSTPESGSASPGSTSESPSGTAPGTSTEPSEGSAPGTSTEPSEGSAPGTSTEPSEGSAPGSSTPSGATGSPGSSPSASTGTGPGASPGTSSTGSPGSEPATSGSETPGTSESATPESGPGSPAGSPTSTEEGSSTPSGATGSPGSSPSASTGTGPGASPGTSSTGSPGTSESATPESGPGTSTEPSEGSAPGTSTEPSEGSAPGMNSGVCLCVLMAVLAAGALTQPVPPADPAGSGLQRAEEAPRRQLRVSQRTDGESRAHLGALLARYIQQARKAPSGRMSIVKNLQNLDPSHRISDRDYMGWMDFGRRSAEEYEYPS

SEQ ID NO: 1126 - protein, 260 aa, Artificial Sequence
  Description of Artificial Sequence: Synthetic polypeptide
GSEPATSGSETPGTSESATPESGPGSEPATSGSETPGSPAGSPTSTEEGTSTEPSEGSAPGSEPATSGSETPGSEPATSGSETPGSEPATSGSETPGTSTEPSEGSAPGTSESATPESGPGSEPATSGSETPGTSTEPSEGSAPGMNSGVCLCVLMAVLAAGALTQPVPPADPAGSGLQRAEEAPRRQLRVSQRTDGESRAHLGALLARYIQQARKAPSGRMSIVKNLQNLDPSHRISDRDYMGWMDFGRRSAEEYEYPS

SEQ ID NO: 1127 - protein, 260 aa, Artificial Sequence
  Description of Artificial Sequence: Synthetic polypeptide
GTSTPESGSASPGTSPSGESSTAPGTSPSGESSTAPGSTSSTAESPGPGSTSESPSGTAPGSTSSTAESPGPGTSPSGESSTAPGTSTPESGSASPGSTSSTAESPGPGTSPSGESSTAPGTSPSGESSTAPGTSPSGESSTAPGMNSGVCLCVLMAVLAAGALTQPVPPADPAGSGLQRAEEAPRRQLRVSQRTDGESRAHLGALLARYIQQARKAPSGRMSIVKNLQNLDPSHRISDRDYMGWMDFGRRSAEEYEYPS

SEQ ID NO: 1128 - protein, 404 aa, Artificial Sequence
  Description of Artificial Sequence: Synthetic polypeptide
GTSESATPESGPGSEPATSGSETPGTSESATPESGPGSEPATSGSETPGTSESATPESGPGTSTEPSEGSAPGSPAGSPTSTEEGTSESATPESGPGSEPATSGSETPGTSESATPESGPGSPAGSPTSTEEGSPAGSPTSTEEGTSTEPSEGSAPGTSESATPESGPGTSESATPESGPGTSESATPESGPGSEPATSGSETPGSEPATSGSETPGSPAGSPTSTEEGTSTEPSEGSAPGTSTEPSEGSAPGSEPATSGSETPGTSESATPESGPGTSTEPSEGSAPGMNSGVCLCVLMAVLAAGALTQPVPPADPAGSGLQRAEEAPRRQLRVSQRTDGESRAHLGALLARYIQQARKAPSGRMSIVKNLQNLDPSHRISDRDYMGWMDFGRRSAEEYEYPS

SEQ ID NO: 1129 - protein, 692 aa, Artificial Sequence
  Description of Artificial Sequence: Synthetic polypeptide
GSPAGSPTSTEEGTSESATPESGPGTSTEPSEGSAPGSPAGSPTSTEEGTSTEPSEGSAPGTSTEPSEGSAPGTSESATPESGPGSEPATSGSETPGSEPATSGSETPGSPAGSPTSTEEGTSESATPESGPGTSTEPSEGSAPGTSTEPSEGSAPGSPAGSPTSTEEGTSTEPSEGSAPGTSTEPSEGSAPGTSESATPESGPGTSTEPSEGSAPGTSESATPESGPGSEPATSGSETPGTSTEPSEGSAPGTSTEPSEGSAPGTSESATPESGPGTSESATPESGPGSPAGSPTSTEEGTSESATPESGPGSEPATSGSETPGTSESATPESGPGTSTEPSEGSAPGTSTEPSEGSAPGTSTEPSEGSAPGTSTEPSEGSAPGTSTEPSEGSAPGTSTEPSEGSAPGSPAGSPTSTEEGTSTEPSEGSAPGTSESATPESGPGSEPATSGSETPGTSESATPESGPGSEPATSGSETPGTSESATPESGPGTSTEPSEGSAPGTSESATPESGPGSPAGSPTSTEEGSPAGSPTSTEEGSPAGSPTSTEEGTSESATPESGPGTSTEPSEGSAPGMNSGVCLCVLMAVLAAGALTQPVPPADPAGSGLQRAEEAPRRQLRVSQRTDGESRAHLGALLARYIQQARKAPSGRMSIVKNLQNLDPSHRISDRDYMGWMDFGRRSAEEYEYPS

SEQ ID NO: 1130 - protein, 692 aa, Artificial Sequence
  Description of Artificial Sequence: Synthetic polypeptide
GSTSSTAESPGPGSTSSTAESPGPGSTSESPSGTAPGSTSSTAESPGPGSTSSTAESPGPGTSTPESGSASPGSTSESPSGTAPGTSPSGESSTAPGSTSESPSGTAPGSTSESPSGTAPGTSPSGESSTAPGSTSESPSGTAPGSTSESPSGTAPGTSPSGESSTAPGSTSESPSGTAPGSTSESPSGTAPGSTSESPSGTAPGTSTPESGSASPGSTSESPSGTAPGTSTPESGSASPGSTSSTAESPGPGSTSSTAESPGPGTSTPESGSASPGTSTPESGSASPGSTSESPSGTAPGTSTPESGSASPGTSTPESGSASPGSTSESPSGTAPGSTSESPSGTAPGSTSESPSGTAPGSTSSTAESPGPGTSTPESGSASPGTSTPESGSASPGSTSESPSGTAPGSTSESPSGTAPGTSTPESGSASPGSTSESPSGTAPGSTSESPSGTAPGTSTPESGSASPGTSPSGESSTAPGSTSSTAESPGPGTSPSGESSTAPGSTSSTAESPGPGTSTPESGSASPGSTSESPSGTAPGSTSSTAESPGPGTSTPESGSASPGTSTPESGSASPGMNSGVCLCVLMAVLAAGALTQPVPPADPAGSGLQRAEEAPRRQLRVSQRTDGESRAHLGALLARYIQQARKAPSGRMSIVKNLQNLDPSHRISDRDYMGWMDFGRRSAEEYEYPS

SEQ ID NO: 1131 - protein, 952 aa, Artificial Sequence
  Description of Artificial Sequence: Synthetic polypeptide
GSSESGSSEGGPGSSESGSSEGGPGESPGGSSGSESGSGGEPSESGSSGESPGGSSGSESGESPGGSSGSESGSSESGSSEGGPGSSESGSSEGGPGSSESGSSEGGPGESPGGSSGSESGESPGGSSGSESGESPGGSSGSESGSSESGSSEGGPGSSESGSSEGGPGSSESGSSEGGPGSSESGSSEGGPGSSESGSSEGGPGSSESGSSEGGPGSGGEPSESGSSGESPGGSSGSESGESPGGSSGSESGSGGEPSESGSSGSEGSSGPGESSGSSESGSSEGGPGSGGEPSESGSSGSEGSSGPGESSGSSESGSSEGGPGSGGEPSESGSSGESPGGSSGSESGSGGEPSESGSSGSGGEPSESGSSGSSESGSSEGGPGSGGEPSESGSSGSGGEPSESGSSGSEGSSGPGESSGESPGGSSGSESGSEGSSGPGESSGSEGSSGPGESSGSGGEPSESGSSGSSESGSSEGGPGSSESGSSEGGPGESPGGSSGSESGSGGEPSESGSSGSEGSSGPGESSGESPGGSSGSESGSEGSSGPGSSESGSSEGGPGSGGEPSESGSSGSEGSSGPGESSGSEGSSGPGESSGSEGSSGPGESSGSGGEPSESGSSGSGGEPSESGSSGESPGGSSGSESGESPGGSSGSESGSGGEPSESGSSGSEGSSGPGESSGESPGGSSGSESGSSESGSSEGGPGSSESGSSEGGPGSSESGSSEGGPGSGGEPSESGSSGSSESGSSEGGPGESPGGSSGSESGSGGEPSESGSSGSSESGSSEGGPGESPGGSSGSESGSGGEPSESGSSGESPGGSSGSESGSGGEPSESGSSGMNSGVCLCVLMAVLAAGALTQPVPPADPAGSGLQRAEEAPRRQLRVSQRTDGESRAHLGALLARYIQQARKAPSGRMSIVKNLQNLDPSHRISDRDYMGWMDFGRRSAEEYEYPS

SEQ ID NO: 1132 - protein, 980 aa, Artificial Sequence
  Description of Artificial Sequence: Synthetic polypeptide
GSPAGSPTSTEEGTSESATPESGPGTSTEPSEGSAPGSPAGSPTSTEEGTSTEPSEGSAPGTSTEPSEGSAPGTSESATPESGPGSEPATSGSETPGSEPATSGSETPGSPAGSPTSTEEGTSESATPESGPGTSTEPSEGSAPGTSTEPSEGSAPGSPAGSPTSTEEGTSTEPSEGSAPGTSTEPSEGSAPGTSESATPESGPGTSTEPSEGSAPGTSESATPESGPGSEPATSGSETPGTSTEPSEGSAPGTSTEPSEGSAPGTSESATPESGPGTSESATPESGPGSPAGSPTSTEEGTSESATPESGPGSEPATSGSETPGTSESATPESGPGTSTEPSEGSAPGTSTEPSEGSAPGTSTEPSEGSAPGTSTEPSEGSAPGTSTEPSEGSAPGTSTEPSEGSAPGSPAGSPTSTEEGTSTEPSEGSAPGTSESATPESGPGSEPATSGSETPGTSESATPESGPGSEPATSGSETPGTSESATPESGPGTSTEPSEGSAPGTSESATPESGPGSPAGSPTSTEEGSPAGSPTSTEEGSPAGSPTSTEEGTSESATPESGPGTSTEPSEGSAPGTSESATPESGPGSEPATSGSETPGTSESATPESGPGSEPATSGSETPGTSESATPESGPGTSTEPSEGSAPGSPAGSPTSTEEGTSESATPESGPGSEPATSGSETPGTSESATPESGPGSPAGSPTSTEEGSPAGSPTSTEEGTSTEPSEGSAPGTSESATPESGPGTSESATPESGPGTSESATPESGPGSEPATSGSETPGSEPATSGSETPGSPAGSPTSTEEGTSTEPSEGSAPGTSTEPSEGSAPGSEPATSGSETPGTSESATPESGPGTSTEPSEGSAPGMNSGVCLCVLMAVLAAGALTQPVPPADPAGSGLQRAEEAPRRQLRVSQRTDGESRAHLGALLARYIQQARKAPSGRMSIVKNLQNLDPSHRISDRDYMGWMDFGRRSAEEYEYPS

SEQ ID NO: 1133 - protein, 991 aa, Artificial Sequence
  Description of Artificial Sequence: Synthetic polypeptide
  MOD_RES (430)..(432): Any amino acid
  MOD_RES (443)..(446): Any amino acid
GSTSESPSGTAPGTSPSGESSTAPGSTSESPSGTAPGSTSESPSGTAPGTSTPESGSASPGTSTPESGSASPGSTSESPSGTAPGSTSESPSGTAPGTSPSGESSTAPGSTSESPSGTAPGTSPSGESSTAPGTSPSGESSTAPGSTSSTAESPGPGTSPSGESSTAPGTSPSGESSTAPGSTSSTAESPGPGTSTPESGSASPGTSTPESGSASPGSTSESPSGTAPGSTSESPSGTAPGTSTPESGSASPGSTSSTAESPGPGTSTPESGSASPGSTSESPSGTAPGTSPSGESSTAPGSTSSTAESPGPGTSPSGESSTAPGTSTPESGSASPGSTSSTAESPGPGSTSSTAESPGPGSTSSTAESPGPGSTSSTAESPGPGTSPSGESSTAPGSTSESPSGTAPGSTSESPSGTAPGTSTPESGPXXXGASASGAPSTXXXXSESPSGTAPGSTSESPSGTAPGSTSESPSGTAPGSTSESPSGTAPGSTSESPSGTAPGSTSESPSGTAPGTSTPESGSASPGTSPSGESSTAPGTSPSGESSTAPGSTSSTAESPGPGTSPSGESSTAPGTSTPESGSASPGSTSESPSGTAPGSTSESPSGTAPGTSPSGESSTAPGSTSESPSGTAPGTSTPESGSASPGTSTPESGSASPGSTSESPSGTAPGTSTPESGSASPGSTSSTAESPGPGSTSESPSGTAPGSTSESPSGTAPGTSPSGESSTAPGSTSSTAESPGPGTSPSGESSTAPGTSTPESGSASPGTSPSGESSTAPGTSPSGESSTAPGTSPSGESSTAPGSTSSTAESPGPGSTSSTAESPGPGTSPSGESSTAPGSSPSASTGTGPGSSTPSGATGSPGSSTPSGATGSPGMNSGVCLCVLMAVLAAGALTQPVPPADPAGSGLQRAEEAPRRQLRVSQRTDGESRAHLGALLARYIQQARKAPSGRMSIVKNLQNLDPSHRISDRDYMGWMDFGRRSAEEYEYPS

SEQ ID NO: 1134 - protein, 980 aa, Artificial Sequence
  Description of Artificial Sequence: Synthetic polypeptide
GASPGTSSTGSPGSSPSASTGTGPGSSPSASTGTGPGTPGSGTASSSPGSSTPSGATGSPGSNPSASTGTGPGASPGTSSTGSPGTPGSGTASSSPGSSTPSGATGSPGTPGSGTASSSPGASPGTSSTGSPGASPGTSSTGSPGTPGSGTASSSPGSSTPSGATGSPGASPGTSSTGSPGTPGSGTASSSPGSSTPSGATGSPGSNPSASTGTGPGSSPSASTGTGPGSSTPSGATGSPGSSTPSGATGSPGASPGTSSTGSPGASPGTSSTGSPGASPGTSSTGSPGTPGSGTASSSPGASPGTSSTGSPGASPGTSSTGSPGASPGTSSTGSPGSSPSASTGTGPGTPGSGTASSSPGASPGTSSTGSPGASPGTSSTGSPGASPGTSSTGSPGSSTPSGATGSPGSSTPSGATGSPGASPGTSSTGSPGTPGSGTASSSPGSSTPSGATGSPGSSTPSGATGSPGSSTPSGATGSPGSSPSASTGTGPGASPGTSSTGSPGASPGTSSTGSPGTPGSGTASSSPGASPGTSSTGSPGASPGTSSTGSPGASPGTSSTGSPGASPGTSSTGSPGTPGSGTASSSPGSSTPSGATGSPGTPGSGTASSSPGSSTPSGATGSPGTPGSGTASSSPGSSTPSGATGSPGSSTPSGATGSPGSSPSASTGTGPGSSPSASTGTGPGASPGTSSTGSPGTPGSGTASSSPGSSTPSGATGSPGSSPSASTGTGPGSSPSASTGTGPGASPGTSSTGSPGASPGTSSTGSPGSSTPSGATGSPGSSPSASTGTGPGASPGTSSTGSPGSSPSASTGTGPGTPGSGTASSSPGSSTPSGATGSPGSSTPSGATGSPGASPGTSSTGSPGMNSGVCLCVLMAVLAAGALTQPVPPADPAGSGLQRAEEAPRRQLRVSQRTDGESRAHLGALLARYIQQARKAPSGRMSIVKNLQNLDPSHRISDRDYMGWMDFGRRSAEEYEYPS

SEQ ID NO: 1135 - protein, 991 aa, Artificial Sequence
  Description of Artificial Sequence: Synthetic polypeptide
GTSTEPSEGSAPGSEPATSGSETPGSPAGSPTSTEEGSTSSTAESPGPGTSTPESGSASPGSTSESPSGTAPGSTSESPSGTAPGTSTPESGSASPGTSTPESGSASPGSEPATSGSETPGTSESATPESGPGSPAGSPTSTEEGTSTEPSEGSAPGTSESATPESGPGTSTEPSEGSAPGTSTEPSEGSAPGSPAGSPTSTEEGTSTEPSEGSAPGTSTEPSEGSAPGTSESATPESGPGTSESATPESGPGTSTEPSEGSAPGTSTEPSEGSAPGTSESATPESGPGTSTEPSEGSAPGSEPATSGSETPGSPAGSPTSTEEGSSTPSGATGSPGTPGSGTASSSPGSSTPSGATGSPGTSTEPSEGSAPGTSTEPSEGSAPGSEPATSGSETPGSPAGSPTSTEEGSPAGSPTSTEEGTSTEPSEGSAPGASASGAPSTGGTSESATPESGPGSPAGSPTSTEEGSPAGSPTSTEEGSTSSTAESPGPGSTSESPSGTAPGTSPSGESSTAPGTPGSGTASSSPGSSTPSGATGSPGSSPSASTGTGPGSEPATSGSETPGTSESATPESGPGSEPATSGSETPGSTSSTAESPGPGSTSSTAESPGPGTSPSGESSTAPGSEPATSGSETPGSEPATSGSETPGTSTEPSEGSAPGSTSSTAESPGPGTSTPESGSASPGSTSESPSGTAPGTSTEPSEGSAPGTSTEPSEGSAPGTSTEPSEGSAPGSSTPSGATGSPGSSPSASTGTGPGASPGTSSTGSPGSEPATSGSETPGTSESATPESGPGSPAGSPTSTEEGSSTPSGATGSPGSSPSASTGTGPGASPGTSSTGSPGTSESATPESGPGTSTEPSEGSAPGTSTEPSEGSAPGMNSGVCLCVLMAVLAAGALTQPVPPADPAGSGLQRAEEAPRRQLRVSQRTDGESRAHLGALLARYIQQARKAPSGRMSIVKNLQNLDPSHRISDRDYMGWMDFGRRSAEEYEYPS

SEQ ID NO: 1136 - protein, 203 aa, Artificial Sequence
  Description of Artificial Sequence: Synthetic polypeptide
VSQRTDGESRAHLGALLARYIQQARKAPSGRMSIVKNLQNLDPSHRISDRDYMGWMDFGGSEPATSGSETPGTSESATPESGPGSEPATSGSETPGSPAGSPTSTEEGTSTEPSEGSAPGSEPATSGSETPGSEPATSGSETPGSEPATSGSETPGTSTEPSEGSAPGTSESATPESGPGSEPATSGSETPGTSTEPSEGSAP

SEQ ID NO: 1137 - protein, 203 aa, Artificial Sequence
  Description of Artificial Sequence: Synthetic polypeptide
VSQRTDGESRAHLGALLARYIQQARKAPSGRMSIVKNLQNLDPSHRISDRDYMGWMDFGGTSTPESGSASPGTSPSGESSTAPGTSPSGESSTAPGSTSSTAESPGPGSTSESPSGTAPGSTSSTAESPGPGTSPSGESSTAPGTSTPESGSASPGSTSSTAESPGPGTSPSGESSTAPGTSPSGESSTAPGTSPSGESSTAP

SEQ ID NO: 1138 - protein, 347 aa, Artificial Sequence
  Description of Artificial Sequence: Synthetic polypeptide
VSQRTDGESRAHLGALLARYIQQARKAPSGRMSIVKNLQNLDPSHRISDRDYMGWMDFGGTSESATPESGPGSEPATSGSETPGTSESATPESGPGSEPATSGSETPGTSESATPESGPGTSTEPSEGSAPGSPAGSPTSTEEGTSESATPESGPGSEPATSGSETPGTSESATPESGPGSPAGSPTSTEEGSPAGSPTSTEEGTSTEPSEGSAPGTSESATPESGPGTSESATPESGPGTSESATPESGPGSEPATSGSETPGSEPATSGSETPGSPAGSPTSTEEGTSTEPSEGSAPGTSTEPSEGSAPGSEPATSGSETPGTSESATPESGPGTSTEPSEGSAP

SEQ ID NO: 1139 - protein, 635 aa, Artificial Sequence
  Description of Artificial Sequence: Synthetic polypeptide
VSQRTDGESRAHLGALLARYIQQARKAPSGRMSIVKNLQNLDPSHRISDRDYMGWMDFGGSPAGSPTSTEEGTSESATPESGPGTSTEPSEGSAPGSPAGSPTSTEEGTSTEPSEGSAPGTSTEPSEGSAPGTSESATPESGPGSEPATSGSETPGSEPATSGSETPGSPAGSPTSTEEGTSESATPESGPGTSTEPSEGSAPGTSTEPSEGSAPGSPAGSPTSTEEGTSTEPSEGSAPGTSTEPSEGSAPGTSESATPESGPGTSTEPSEGSAPGTSESATPESGPGSEPATSGSETPGTSTEPSEGSAPGTSTEPSEGSAPGTSESATPESGPGTSESATPESGPGSPAGSPTSTEEGTSESATPESGPGSEPATSGSETPGTSESATPESGPGTSTEPSEGSAPGTSTEPSEGSAPGTSTEPSEGSAPGTSTEPSEGSAPGTSTEPSEGSAPGTSTEPSEGSAPGSPAGSPTSTEEGTSTEPSEGSAPGTSESATPESGPGSEPATSGSETPGTSESATPESGPGSEPATSGSETPGTSESATPESGPGTSTEPSEGSAPGTSESATPESGPGSPAGSPTSTEEGSPAGSPTSTEEGSPAGSPTSTEEGTSESATPESGPGTSTEPSEGSAP

SEQ ID NO: 1140 - protein, 635 aa, Artificial Sequence
  Description of Artificial Sequence: Synthetic polypeptide
VSQRTDGESRAHLGALLARYIQQARKAPSGRMSIVKNLQNLDPSHRISDRDYMGWMDFGGSTSSTAESPGPGSTSSTAESPGPGSTSESPSGTAPGSTSSTAESPGPGSTSSTAESPGPGTSTPESGSASPGSTSESPSGTAPGTSPSGESSTAPGSTSESPSGTAPGSTSESPSGTAPGTSPSGESSTAPGSTSESPSGTAPGSTSESPSGTAPGTSPSGESSTAPGSTSESPSGTAPGSTSESPSGTAPGSTSESPSGTAPGTSTPESGSASPGSTSESPSGTAPGTSTPESGSASPGSTSSTAESPGPGSTSSTAESPGPGTSTPESGSASPGTSTPESGSASPGSTSESPSGTAPGTSTPESGSASPGTSTPESGSASPGSTSESPSGTAPGSTSESPSGTAPGSTSESPSGTAPGSTSSTAESPGPGTSTPESGSASPGTSTPESGSASPGSTSESPSGTAPGSTSESPSGTAPGTSTPESGSASPGSTSESPSGTAPGSTSESPSGTAPGTSTPESGSASPGTSPSGESSTAPGSTSSTAESPGPGTSPSGESSTAPGSTSSTAESPGPGTSTPESGSASPGSTSESPSGTAPGSTSSTAESPGPGTSTPESGSASPGTSTPESGSASP

SEQ ID NO: 1141 - protein, 895 aa, Artificial Sequence
  Description of Artificial Sequence: Synthetic polypeptide
VSQRTDGESRAHLGALLARYIQQARKAPSGRMSIVKNLQNLDPSHRISDRDYMGWMDFGGSSESGSSEGGPGSSESGSSEGGPGESPGGSSGSESGSGGEPSESGSSGESPGGSSGSESGESPGGSSGSESGSSESGSSEGGPGSSESGSSEGGPGSSESGSSEGGPGESPGGSSGSESGESPGGSSGSESGESPGGSSGSESGSSESGSSEGGPGSSESGSSEGGPGSSESGSSEGGPGSSESGSSEGGPGSSESGSSEGGPGSSESGSSEGGPGSGGEPSESGSSGESPGGSSGSESGESPGGSSGSESGSGGEPSESGSSGSEGSSGPGESSGSSESGSSEGGPGSGGEPSESGSSGSEGSSGPGESSGSSESGSSEGGPGSGGEPSESGSSGESPGGSSGSESGSGGEPSESGSSGSGGEPSESGSSGSSESGSSEGGPGSGGEPSESGSSGSGGEPSESGSSGSEGSSGPGESSGESPGGSSGSESGSEGSSGPGESSGSEGSSGPGESSGSGGEPSESGSSGSSESGSSEGGPGSSESGSSEGGPGESPGGSSGSESGSGGEPSESGSSGSEGSSGPGESSGESPGGSSGSESGSEGSSGPGSSESGSSEGGPGSGGEPSESGSSGSEGSSGPGESSGSEGSSGPGESSGSEGSSGPGESSGSGGEPSESGSSGSGGEPSESGSSGESPGGSSGSESGESPGGSSGSESGSGGEPSESGSSGSEGSSGPGESSGESPGGSSGSESGSSESGSSEGGPGSSESGSSEGGPGSSESGSSEGGPGSGGEPSESGSSGSSESGSSEGGPGESPGGSSGSESGSGGEPSESGSSGSSESGSSEGGPGESPGGSSGSESGSGGEPSESGSSGESPGGSSGSESGSGGEPSESGSS

SEQ ID NO: 1142 - protein, 923 aa, Artificial Sequence
  Description of Artificial Sequence: Synthetic polypeptide
VSQRTDGESRAHLGALLARYIQQARKAPSGRMSIVKNLQNLDPSHRISDRDYMGWMDFGGSPAGSPTSTEEGTSESATPESGPGTSTEPSEGSAPGSPAGSPTSTEEGTSTEPSEGSAPGTSTEPSEGSAPGTSESATPESGPGSEPATSGSETPGSEPATSGSETPGSPAGSPTSTEEGTSESATPESGPGTSTEPSEGSAPGTSTEPSEGSAPGSPAGSPTSTEEGTSTEPSEGSAPGTSTEPSEGSAPGTSESATPESGPGTSTEPSEGSAPGTSESATPESGPGSEPATSGSETPGTSTEPSEGSAPGTSTEPSEGSAPGTSESATPESGPGTSESATPESGPGSPAGSPTSTEEGTSESATPESGPGSEPATSGSETPGTSESATPESGPGTSTEPSEGSAPGTSTEPSEGSAPGTSTEPSEGSAPGTSTEPSEGSAPGTSTEPSEGSAPGTSTEPSEGSAPGSPAGSPTSTEEGTSTEPSEGSAPGTSESATPESGPGSEPATSGSETPGTSESATPESGPGSEPATSGSETPGTSESATPESGPGTSTEPSEGSAPGTSESATPESGPGSPAGSPTSTEEGSPAGSPTSTEEGSPAGSPTSTEEGTSESATPESGPGTSTEPSEGSAPGTSESATPESGPGSEPATSGSETPGTSESATPESGPGSEPATSGSETPGTSESATPESGPGTSTEPSEGSAPGSPAGSPTSTEEGTSESATPESGPGSEPATSGSETPGTSESATPESGPGSPAGSPTSTEEGSPAGSPTSTEEGTSTEPSEGSAPGTSESATPESGPGTSESATPESGPGTSESATPESGPGSEPATSGSETPGSEPATSGSETPGSPAGSPTSTEEGTSTEPSEGSAPGTSTEPSEGSAPGSEPATSGSETPGTSESATPESGPGTSTEPSEGSAP

SEQ ID NO: 1143 - protein, 934 aa, Artificial Sequence
  Description of Artificial Sequence: Synthetic polypeptide
  MOD_RES (489)..(491): Any amino acid
  MOD_RES (502)..(505): Any amino acid
VSQRTDGESRAHLGALLARYIQQARKAPSGRMSIVKNLQNLDPSHRISDRDYMGWMDFGGSTSESPSGTAPGTSPSGESSTAPGSTSESPSGTAPGSTSESPSGTAPGTSTPESGSASPGTSTPESGSASPGSTSESPSGTAPGSTSESPSGTAPGTSPSGESSTAPGSTSESPSGTAPGTSPSGESSTAPGTSPSGESSTAPGSTSSTAESPGPGTSPSGESSTAPGTSPSGESSTAPGSTSSTAESPGPGTSTPESGSASPGTSTPESGSASPGSTSESPSGTAPGSTSESPSGTAPGTSTPESGSASPGSTSSTAESPGPGTSTPESGSASPGSTSESPSGTAPGTSPSGESSTAPGSTSSTAESPGPGTSPSGESSTAPGTSTPESGSASPGSTSSTAESPGPGSTSSTAESPGPGSTSSTAESPGPGSTSSTAESPGPGTSPSGESSTAPGSTSESPSGTAPGSTSESPSGTAPGTSTPESGPXXXGASASGAPSTXXXXSESPSGTAPGSTSESPSGTAPGSTSESPSGTAPGSTSESPSGTAPGSTSESPSGTAPGSTSESPSGTAPGTSTPESGSASPGTSPSGESSTAPGTSPSGESSTAPGSTSSTAESPGPGTSPSGESSTAPGTSTPESGSASPGSTSESPSGTAPGSTSESPSGTAPGTSPSGESSTAPGSTSESPSGTAPGTSTPESGSASPGTSTPESGSASPGSTSESPSGTAPGTSTPESGSASPGSTSSTAESPGPGSTSESPSGTAPGSTSESPSGTAPGTSPSGESSTAPGSTSSTAESPGPGTSPSGESSTAPGTSTPESGSASPGTSPSGESSTAPGTSPSGESSTAPGTSPSGESSTAPGSTSSTAESPGPGSTSSTAESPGPGTSPSGESSTAPGSSPSASTGTGPGSSTPSGATGSPGSSTPSGATGSP

SEQ ID NO: 1144 - protein, 923 aa, Artificial Sequence
  Description of Artificial Sequence: Synthetic polypeptide
VSQRTDGESRAHLGALLARYIQQARKAPSGRMSIVKNLQNLDPSHRISDRDYMGWMDFGGASPGTSSTGSPGSSPSASTGTGPGSSPSASTGTGPGTPGSGTASSSPGSSTPSGATGSPGSNPSASTGTGPGASPGTSSTGSPGTPGSGTASSSPGSSTPSGATGSPGTPGSGTASSSPGASPGTSSTGSPGASPGTSSTGSPGTPGSGTASSSPGSSTPSGATGSPGASPGTSSTGSPGTPGSGTASSSPGSSTPSGATGSPGSNPSASTGTGPGSSPSASTGTGPGSSTPSGATGSPGSSTPSGATGSPGASPGTSSTGSPGASPGTSSTGSPGASPGTSSTGSPGTPGSGTASSSPGASPGTSSTGSPGASPGTSSTGSPGASPGTSSTGSPGSSPSASTGTGPGTPGSGTASSSPGASPGTSSTGSPGASPGTSSTGSPGASPGTSSTGSPGSSTPSGATGSPGSSTPSGATGSPGASPGTSSTGSPGTPGSGTASSSPGSSTPSGATGSPGSSTPSGATGSPGSSTPSGATGSPGSSPSASTGTGPGASPGTSSTGSPGASPGTSSTGSPGTPGSGTASSSPGASPGTSSTGSPGASPGTSSTGSPGASPGTSSTGSPGASPGTSSTGSPGTPGSGTASSSPGSSTPSGATGSPGTPGSGTASSSPGSSTPSGATGSPGTPGSGTASSSPGSSTPSGATGSPGSSTPSGATGSPGSSPSASTGTGPGSSPSASTGTGPGASPGTSSTGSPGTPGSGTASSSPGSSTPSGATGSPGSSPSASTGTGPGSSPSASTGTGPGASPGTSSTGSPGASPGTSSTGSPGSSTPSGATGSPGSSPSASTGTGPGASPGTSSTGSPGSSPSASTGTGPGTPGSGTASSSPGSSTPSGATGSPGSSTPSGATGSPGASPGTSSTGSP

SEQ ID NO: 1145 - protein, 934 aa, Artificial Sequence
  Description of Artificial Sequence: Synthetic polypeptide
VSQRTDGESRAHLGALLARYIQQARKAPSGRMSIVKNLQNLDPSHRISDRDYMGWMDFGGTSTEPSEGSAPGSEPATSGSETPGSPAGSPTSTEEGSTSSTAESPGPGTSTPESGSASPGSTSESPSGTAPGSTSESPSGTAPGTSTPESGSASPGTSTPESGSASPGSEPATSGSETPGTSESATPESGPGSPAGSPTSTEEGTSTEPSEGSAPGTSESATPESGPGTSTEPSEGSAPGTSTEPSEGSAPGSPAGSPTSTEEGTSTEPSEGSAPGTSTEPSEGSAPGTSESATPESGPGTSESATPESGPGTSTEPSEGSAPGTSTEPSEGSAPGTSESATPESGPGTSTEPSEGSAPGSEPATSGSETPGSPAGSPTSTEEGSSTPSGATGSPGTPGSGTASSSPGSSTPSGATGSPGTSTEPSEGSAPGTSTEPSEGSAPGSEPATSGSETPGSPAGSPTSTEEGSPAGSPTSTEEGTSTEPSEGSAPGASASGAPSTGGTSESATPESGPGSPAGSPTSTEEGSPAGSPTSTEEGSTSSTAESPGPGSTSESPSGTAPGTSPSGESSTAPGTPGSGTASSSPGSSTPSGATGSPGSSPSASTGTGPGSEPATSGSETPGTSESATPESGPGSEPATSGSETPGSTSSTAESPGPGSTSSTAESPGPGTSPSGESSTAPGSEPATSGSETPGSEPATSGSETPGTSTEPSEGSAPGSTSSTAESPGPGTSTPESGSASPGSTSESPSGTAPGTSTEPSEGSAPGTSTEPSEGSAPGTSTEPSEGSAPGSSTPSGATGSPGSSPSASTGTGPGASPGTSSTGSPGSEPATSGSETPGTSESATPESGPGSPAGSPTSTEEGSSTPSGATGSPGSSPSASTGTGPGASPGTSSTGSPGTSESATPESGPGTSTEPSEGSAPGTSTEPSEGSAP

SEQ ID NO: 1146 - protein, 1377 aa, Artificial Sequence
  Description of Artificial Sequence: Synthetic polypeptide
VSQRTDGESRAHLGALLARYIQQARKAPSGRMSIVKNLQNLDPSHRISDRDYMGWMDFGGTSTEPSEGSAPGSEPATSGSETPGSPAGSPTSTEEGSTSSTAESPGPGTSTPESGSASPGSTSESPSGTAPGSTSESPSGTAPGTSTPESGSASPGTSTPESGSASPGSEPATSGSETPGTSESATPESGPGSPAGSPTSTEEGTSTEPSEGSAPGTSESATPESGPGTSTEPSEGSAPGTSTEPSEGSAPGSPAGSPTSTEEGTSTEPSEGSAPGTSTEPSEGSAPGTSESATPESGPGTSESATPESGPGTSTEPSEGSAPGTSTEPSEGSAPGTSESATPESGPGTSTEPSEGSAPGSEPATSGSETPGSPAGSPTSTEEGSSTPSGATGSPGTPGSGTASSSPGSSTPSGATGSPGTSTEPSEGSAPGTSTEPSEGSAPGSEPATSGSETPGSPAGSPTSTEEGSPAGSPTSTEEGTSTEPSEGSAPGPEPTGPAPSGGSEPATSGSETPGTSESATPESGPGSPAGSPTSTEEGTSESATPESGPGSPAGSPTSTEEGSPAGSPTSTEEGTSESATPESGPGSPAGSPTSTEEGSPAGSPTSTEEGSTSSTAESPGPGSTSESPSGTAPGTSPSGESSTAPGSTSESPSGTAPGSTSESPSGTAPGTSPSGESSTAPGTSTEPSEGSAPGTSESATPESGPGTSESATPESGPGSEPATSGSETPGTSESATPESGPGTSESATPESGPGTSTEPSEGSAPGTSESATPESGPGTSTEPSEGSAPGTSPSGESSTAPGTSPSGESSTAPGTSPSGESSTAPGTSTEPSEGSAPGSPAGSPTSTEEGTSTEPSEGSAPGSSPSASTGTGPGSSTPSGATGSPGSSTPSGATGSPGSSTPSGATGSPGSSTPSGATGSPGASPGTSSTGSPGASASGAPSTGGTSPSGESSTAPGSTSSTAESPGPGTSPSGESSTAPGTSESATPESGPGTSTEPSEGSAPGTSTEPSEGSAPGSSPSASTGTGPGSSTPSGATGSPGASPGTSSTGSPGTSTPESGSASPGTSPSGESSTAPGTSPSGESSTAPGTSESATPESGPGSEPATSGSETPGTSTEPSEGSAPGSTSESPSGTAPGSTSESPSGTAPGTSTPESGSASPGSPAGSPTSTEEGTSESATPESGPGTSTEPSEGSAPGSPAGSPTSTEEGTSESATPESGPGSEPATSGSETPGSSTPSGATGSPGASPGTSSTGSPGSSTPSGATGSPGSTSESPSGTAPGTSPSGESSTAPGSTSSTAESPGPGSSTPSGATGSPGASPGTSSTGSPGTPGSGTASSSPGSPAGSPTSTEEGSPAGSPTSTEEGTSTEPSEGSAP

SEQ ID NO: 1147 - protein, 972 aa, Artificial Sequence
  Description of Artificial Sequence: Synthetic polypeptide
MAEPAGSPTSTEEGTPGSGTASSSPGSSTPSGATGSPGASPGTSSTGSPGSPAGSPTSTEEGTSESATPESGPGTSTEPSEGSAPGSPAGSPTSTEEGTSTEPSEGSAPGTSTEPSEGSAPGTSESATPESGPGSEPATSGSETPGSEPATSGSETPGSPAGSPTSTEEGTSESATPESGPGTSTEPSEGSAPGTSTEPSEGSAPGSPAGSPTSTEEGTSTEPSEGSAPGTSTEPSEGSAPGTSESATPESGPGTSTEPSEGSAPGTSESATPESGPGSEPATSGSETPGTSTEPSEGSAPGTSTEPSEGSAPGTSESATPESGPGTSESATPESGPGSPAGSPTSTEEGTSESATPESGPGSEPATSGSETPGTSESATPESGPGTSTEPSEGSAPGTSTEPSEGSAPGTSTEPSEGSAPGTSTEPSEGSAPGTSTEPSEGSAPGTSTEPSEGSAPGSPAGSPTSTEEGTSTEPSEGSAPGTSESATPESGPGSEPATSGSETPGTSESATPESGPGSEPATSGSETPGTSESATPESGPGTSTEPSEGSAPGTSESATPESGPGSPAGSPTSTEEGSPAGSPTSTEEGSPAGSPTSTEEGTSESATPESGPGTSTEPSEGSAPGTSESATPESGPGSEPATSGSETPGTSESATPESGPGSEPATSGSETPGTSESATPESGPGTSTEPSEGSAPGSPAGSPTSTEEGTSESATPESGPGSEPATSGSETPGTSESATPESGPGSPAGSPTSTEEGSPAGSPTSTEEGTSTEPSEGSAPGTSESATPESGPGTSESATPESGPGTSESATPESGPGSEPATSGSETPGSEPATSGSETPGSPAGSPTSTEEGTSTEPSEGSAPGTSTEPSEGSAPGSEPATSGSETPGTSESATPESGPGTSTEPSEGSAPGVSQRTDGESRAHLGALLARYIQQARKAPSGRMSIVKNLQNLDPSHRISDRDYMGWMDF

SEQ ID NO: 1148 - protein, 983 aa, Artificial Sequence
  Description of Artificial Sequence: Synthetic polypeptide
MAEPAGSPTSTEEGASPGTSSTGSPGSSTPSGATGSPGSSTPSGATGSPGTSTEPSEGSAPGSEPATSGSETPGSPAGSPTSTEEGSTSSTAESPGPGTSTPESGSASPGSTSESPSGTAPGSTSESPSGTAPGTSTPESGSASPGTSTPESGSASPGSEPATSGSETPGTSESATPESGPGSPAGSPTSTEEGTSTEPSEGSAPGTSESATPESGPGTSTEPSEGSAPGTSTEPSEGSAPGSPAGSPTSTEEGTSTEPSEGSAPGTSTEPSEGSAPGTSESATPESGPGTSESATPESGPGTSTEPSEGSAPGTSTEPSEGSAPGTSESATPESGPGTSTEPSEGSAPGSEPATSGSETPGSPAGSPTSTEEGSSTPSGATGSPGTPGSGTASSSPGSSTPSGATGSPGTSTEPSEGSAPGTSTEPSEGSAPGSEPATSGSETPGSPAGSPTSTEEGSPAGSPTSTEEGTSTEPSEGSAPGASASGAPSTGGTSESATPESGPGSPAGSPTSTEEGSPAGSPTSTEEGSTSSTAESPGPGSTSESPSGTAPGTSPSGESSTAPGTPGSGTASSSPGSSTPSGATGSPGSSPSASTGTGPGSEPATSGSETPGTSESATPESGPGSEPATSGSETPGSTSSTAESPGPGSTSSTAESPGPGTSPSGESSTAPGSEPATSGSETPGSEPATSGSETPGTSTEPSEGSAPGSTSSTAESPGPGTSTPESGSASPGSTSESPSGTAPGTSTEPSEGSAPGTSTEPSEGSAPGTSTEPSEGSAPGSSTPSGATGSPGSSPSASTGTGPGASPGTSSTGSPGSEPATSGSETPGTSESATPESGPGSPAGSPTSTEEGSSTPSGATGSPGSSPSASTGTGPGASPGTSSTGSPGTSESATPESGPGTSTEPSEGSAPGTSTEPSEGSAPGVSQRTDGESRAHLGALLARYIQQARKAPSGRMSIVKNLQNLDPSHRISDRDYMGWMDF

SEQ ID NO: 1149 - protein, 203 aa, Artificial Sequence
  Description of Artificial Sequence: Synthetic polypeptide
GSEPATSGSETPGTSESATPESGPGSEPATSGSETPGSPAGSPTSTEEGTSTEPSEGSAPGSEPATSGSETPGSEPATSGSETPGSEPATSGSETPGTSTEPSEGSAPGTSESATPESGPGSEPATSGSETPGTSTEPSEGSAPGVSQRTDGESRAHLGALLARYIQQARKAPSGRMSIVKNLQNLDPSHRISDRDYMGWMDF

SEQ ID NO: 1150 - protein, 347 aa, Artificial Sequence
  Description of Artificial Sequence: Synthetic polypeptide
GTSESATPESGPGSEPATSGSETPGTSESATPESGPGSEPATSGSETPGTSESATPESGPGTSTEPSEGSAPGSPAGSPTSTEEGTSESATPESGPGSEPATSGSETPGTSESATPESGPGSPAGSPTSTEEGSPAGSPTSTEEGTSTEPSEGSAPGTSESATPESGPGTSESATPESGPGTSESATPESGPGSEPATSGSETPGSEPATSGSETPGSPAGSPTSTEEGTSTEPSEGSAPGTSTEPSEGSAPGSEPATSGSETPGTSESATPESGPGTSTEPSEGSAPGVSQRTDGESRAHLGALLARYIQQARKAPSGRMSIVKNLQNLDPSHRISDRDYMGWMDF

SEQ ID NO: 1151 - protein, 635 aa, Artificial Sequence
  Description of Artificial Sequence: Synthetic polypeptide
GSPAGSPTSTEEGTSESATPESGPGTSTEPSEGSAPGSPAGSPTSTEEGTSTEPSEGSAPGTSTEPSEGSAPGTSESATPESGPGSEPATSGSETPGSEPATSGSETPGSPAGSPTSTEEGTSESATPESGPGTSTEPSEGSAPGTSTEPSEGSAPGSPAGSPTSTEEGTSTEPSEGSAPGTSTEPSEGSAPGTSESATPESGPGTSTEPSEGSAPGTSESATPESGPGSEPATSGSETPGTSTEPSEGSAPGTSTEPSEGSAPGTSESATPESGPGTSESATPESGPGSPAGSPTSTEEGTSESATPESGPGSEPATSGSETPGTSESATPESGPGTSTEPSEGSAPGTSTEPSEGSAPGTSTEPSEGSAPGTSTEPSEGSAPGTSTEPSEGSAPGTSTEPSEGSAPGSPAGSPTSTEEGTSTEPSEGSAPGTSESATPESGPGSEPATSGSETPGTSESATPESGPGSEPATSGSETPGTSESATPESGPGTSTEPSEGSAPGTSESATPESGPGSPAGSPTSTEEGSPAGSPTSTEEGSPAGSPTSTEEGTSESATPESGPGTSTEPSEGSAPGVSQRTDGESRAHLGALLARYIQQARKAPSGRMSIVKNLQNLDPSHRISDRDYMGWMDF

SEQ ID NO: 1152 - protein, 635 aa, Artificial Sequence
  Description of Artificial Sequence: Synthetic polypeptide
GSTSSTAESPGPGSTSSTAESPGPGSTSESPSGTAPGSTSSTAESPGPGSTSSTAESPGPGTSTPESGSASPGSTSESPSGTAPGTSPSGESSTAPGSTSESPSGTAPGSTSESPSGTAPGTSPSGESSTAPGSTSESPSGTAPGSTSESPSGTAPGTSPSGESSTAPGSTSESPSGTAPGSTSESPSGTAPGSTSESPSGTAPGTSTPESGSASPGSTSESPSGTAPGTSTPESGSASPGSTSSTAESPGPGSTSSTAESPGPGTSTPESGSASPGTSTPESGSASPGSTSESPSGTAPGTSTPESGSASPGTSTPESGSASPGSTSESPSGTAPGSTSESPSGTAPGSTSESPSGTAPGSTSSTAESPGPGTSTPESGSASPGTSTPESGSASPGSTSESPSGTAPGSTSESPSGTAPGTSTPESGSASPGSTSESPSGTAPGSTSESPSGTAPGTSTPESGSASPGTSPSGESSTAPGSTSSTAESPGPGTSPSGESSTAPGSTSSTAESPGPGTSTPESGSASPGSTSESPSGTAPGSTSSTAESPGPGTSTPESGSASPGTSTPESGSASPGVSQRTDGESRAHLGALLARYIQQARKAPSGRMSIVKNLQNLDPSHRISDRDYMGWMDF

SEQ ID NO: 1153 - protein, 895 aa, Artificial Sequence
  Description of Artificial Sequence: Synthetic polypeptide
GSSESGSSEGGPGSSESGSSEGGPGESPGGSSGSESGSGGEPSESGSSGESPGGSSGSESGESPGGSSGSESGSSESGSSEGGPGSSESGSSEGGPGSSESGSSEGGPGESPGGSSGSESGESPGGSSGSESGESPGGSSGSESGSSESGSSEGGPGSSESGSSEGGPGSSESGSSEGGPGSSESGSSEGGPGSSESGSSEGGPGSSESGSSEGGPGSGGEPSESGSSGESPGGSSGSESGESPGGSSGSESGSGGEPSESGSSGSEGSSGPGESSGSSESGSSEGGPGSGGEPSESGSSGSEGSSGPGESSGSSESGSSEGGPGSGGEPSESGSSGESPGGSSGSESGSGGEPSESGSSGSGGEPSESGSSGSSESGSSEGGPGSGGEPSESGSSGSGGEPSESGSSGSEGSSGPGESSGESPGGSSGSESGSEGSSGPGESSGSEGSSGPGESSGSGGEPSESGSSGSSESGSSEGGPGSSESGSSEGGPGESPGGSSGSESGSGGEPSESGSSGSEGSSGPGESSGESPGGSSGSESGSEGSSGPGSSESGSSEGGPGSGGEPSESGSSGSEGSSGPGESSGSEGSSGPGESSGSEGSSGPGESSGSGGEPSESGSSGSGGEPSESGSSGESPGGSSGSESGESPGGSSGSESGSGGEPSESGSSGSEGSSGPGESSGESPGGSSGSESGSSESGSSEGGPGSSESGSSEGGPGSSESGSSEGGPGSGGEPSESGSSGSSESGSSEGGPGESPGGSSGSESGSGGEPSESGSSGSSESGSSEGGPGESPGGSSGSESGSGGEPSESGSSGESPGGSSGSESGSGGEPSESGSSGVSQRTDGESRAHLGALLARYIQQARKAPSGRMSIVKNLQNLDPSHRISDRDYMGWMDF

SEQ ID NO: 1154 - protein, 923 aa, Artificial Sequence
  Description of Artificial Sequence: Synthetic polypeptide
GSPAGSPTSTEEGTSESATPESGPGTSTEPSEGSAPGSPAGSPTSTEEGTSTEPSEGSAPGTSTEPSEGSAPGTSESATPESGPGSEPATSGSETPGSEPATSGSETPGSPAGSPTSTEEGTSESATPESGPGTSTEPSEGSAPGTSTEPSEGSAPGSPAGSPTSTEEGTSTEPSEGSAPGTSTEPSEGSAPGTSESATPESGPGTSTEPSEGSAPGTSESATPESGPGSEPATSGSETPGTSTEPSEGSAPGTSTEPSEGSAPGTSESATPESGPGTSESATPESGPGSPAGSPTSTEEGTSESATPESGPGSEPATSGSETPGTSESATPESGPGTSTEPSEGSAPGTSTEPSEGSAPGTSTEPSEGSAPGTSTEPSEGSAPGTSTEPSEGSAPGTSTEPSEGSAPGSPAGSPTSTEEGTSTEPSEGSAPGTSESATPESGPGSEPATSGSETPGTSESATPESGPGSEPATSGSETPGTSESATPESGPGTSTEPSEGSAPGTSESATPESGPGSPAGSPTSTEEGSPAGSPTSTEEGSPAGSPTSTEEGTSESATPESGPGTSTEPSEGSAPGTSESATPESGPGSEPATSGSETPGTSESATPESGPGSEPATSGSETPGTSESATPESGPGTSTEPSEGSAPGSPAGSPTSTEEGTSESATPESGPGSEPATSGSETPGTSESATPESGPGSPAGSPTSTEEGSPAGSPTSTEEGTSTEPSEGSAPGTSESATPESGPGTSESATPESGPGTSESATPESGPGSEPATSGSETPGSEPATSGSETPGSPAGSPTSTEEGTSTEPSEGSAPGTSTEPSEGSAPGSEPATSGSETPGTSESATPESGPGTSTEPSEGSAPGVSQRTDGESRAHLGALLARYIQQARKAPSGRMSIVKNLQNLDPSHRISDRDYMGWMDF

SEQ ID NO: 1155 - protein, 934 aa, Artificial Sequence
  Description of Artificial Sequence: Synthetic polypeptide
  MOD_RES (430)..(432): Any amino acid
  MOD_RES (443)..(446): Any amino acid
GSTSESPSGTAPGTSPSGESSTAPGSTSESPSGTAPGSTSESPSGTAPGTSTPESGSASPGTSTPESGSASPGSTSESPSGTAPGSTSESPSGTAPGTSPSGESSTAPGSTSESPSGTAPGTSPSGESSTAPGTSPSGESSTAPGSTSSTAESPGPGTSPSGESSTAPGTSPSGESSTAPGSTSSTAESPGPGTSTPESGSASPGTSTPESGSASPGSTSESPSGTAPGSTSESPSGTAPGTSTPESGSASPGSTSSTAESPGPGTSTPESGSASPGSTSESPSGTAPGTSPSGESSTAPGSTSSTAESPGPGTSPSGESSTAPGTSTPESGSASPGSTSSTAESPGPGSTSSTAESPGPGSTSSTAESPGPGSTSSTAESPGPGTSPSGESSTAPGSTSESPSGTAPGSTSESPSGTAPGTSTPESGPXXXGASASGAPSTXXXXSESPSGTAPGSTSESPSGTAPGSTSESPSGTAPGSTSESPSGTAPGSTSESPSGTAPGSTSESPSGTAPGTSTPESGSASPGTSPSGESSTAPGTSPSGESSTAPGSTSSTAESPGPGTSPSGESSTAPGTSTPESGSASPGSTSESPSGTAPGSTSESPSGTAPGTSPSGESSTAPGSTSESPSGTAPGTSTPESGSASPGTSTPESGSASPGSTSESPSGTAPGTSTPESGSASPGSTSSTAESPGPGSTSESPSGTAPGSTSESPSGTAPGTSPSGESSTAPGSTSSTAESPGPGTSPSGESSTAPGTSTPESGSASPGTSPSGESSTAPGTSPSGESSTAPGTSPSGESSTAPGSTSSTAESPGPGSTSSTAESPGPGTSPSGESSTAPGSSPSASTGTGPGSSTPSGATGSPGSSTPSGATGSPGVSQRTDGESRAHLGALLARYIQQARKAPSGRMSIVKNLQNLDPSHRISDRDYMGWMDF

SEQ ID NO: 1156 - protein, 923 aa, Artificial Sequence
  Description of Artificial Sequence: Synthetic polypeptide
GASPGTSSTGSPGSSPSASTGTGPGSSPSASTGTGPGTPGSGTASSSPGSSTPSGATGSPGSNPSASTGTGPGASPGTSSTGSPGTPGSGTASSSPGSSTPSGATGSPGTPGSGTASSSPGASPGTSSTGSPGASPGTSSTGSPGTPGSGTASSSPGSSTPSGATGSPGASPGTSSTGSPGTPGSGTASSSPGSSTPSGATGSPGSNPSASTGTGPGSSPSASTGTGPGSSTPSGATGSPGSSTPSGATGSPGASPGTSSTGSPGASPGTSSTGSPGASPGTSSTGSPGTPGSGTASSSPGASPGTSSTGSPGASPGTSSTGSPGASPGTSSTGSPGSSPSASTGTGPGTPGSGTASSSPGASPGTSSTGSPGASPGTSSTGSPGASPGTSSTGSPGSSTPSGATGSPGSSTPSGATGSPGASPGTSSTGSPGTPGSGTASSSPGSSTPSGATGSPGSSTPSGATGSPGSSTPSGATGSPGSSPSASTGTGPGASPGTSSTGSPGASPGTSSTGSPGTPGSGTASSSPGASPGTSSTGSPGASPGTSSTGSPGASPGTSSTGSPGASPGTSSTGSPGTPGSGTASSSPGSSTPSGATGSPGTPGSGTASSSPGSSTPSGATGSPGTPGSGTASSSPGSSTPSGATGSPGSSTPSGATGSPGSSPSASTGTGPGSSPSASTGTGPGASPGTSSTGSPGTPGSGTASSSPGSSTPSGATGSPGSSPSASTGTGPGSSPSASTGTGPGASPGTSSTGSPGASPGTSSTGSPGSSTPSGATGSPGSSPSASTGTGPGASPGTSSTGSPGSSPSASTGTGPGTPGSGTASSSPGSSTPSGATGSPGSSTPSGATGSPGASPGTSSTGSPGVSQRTDGESRAHLGALLARYIQQARKAPSGRMSIVKNLQNLDPSHRISDRDYMGWMDF

SEQ ID NO: 1157 - protein, 934 aa, Artificial Sequence
  Description of Artificial Sequence: Synthetic polypeptide
GTSTEPSEGSAPGSEPATSGSETPGSPAGSPTSTEEGSTSSTAESPGPGTSTPESGSASPGSTSESPSGTAPGSTSESPSGTAPGTSTPESGSASPGTSTPESGSASPGSEPATSGSETPGTSESATPESGPGSPAGSPTSTEEGTSTEPSEGSAPGTSESATPESGPGTSTEPSEGSAPGTSTEPSEGSAPGSPAGSPTSTEEGTSTEPSEGSAPGTSTEPSEGSAPGTSESATPESGPGTSESATPESGPGTSTEPSEGSAPGTSTEPSEGSAPGTSESATPESGPGTSTEPSEGSAPGSEPATSGSETPGSPAGSPTSTEEGSSTPSGATGSPGTPGSGTASSSPGSSTPSGATGSPGTSTEPSEGSAPGTSTEPSEGSAPGSEPATSGSETPGSPAGSPTSTEEGSPAGSPTSTEEGTSTEPSEGSAPGASASGAPSTGGTSESATPESGPGSPAGSPTSTEEGSPAGSPTSTEEGSTSSTAESPGPGSTSESPSGTAPGTSPSGESSTAPGTPGSGTASSSPGSSTPSGATGSPGSSPSASTGTGPGSEPATSGSETPGTSESATPESGPGSEPATSGSETPGSTSSTAESPGPGSTSSTAESPGPGTSPSGESSTAPGSEPATSGSETPGSEPATSGSETPGTSTEPSEGSAPGSTSSTAESPGPGTSTPESGSASPGSTSESPSGTAPGTSTEPSEGSAPGTSTEPSEGSAPGTSTEPSEGSAPGSSTPSGATGSPGSSPSASTGTGPGASPGTSSTGSPGSEPATSGSETPGTSESATPESGPGSPAGSPTSTEEGSSTPSGATGSPGSSPSASTGTGPGASPGTSSTGSPGTSESATPESGPGTSTEPSEGSAPGTSTEPSEGSAPGVSQRTDGESRAHLGALLARYIQQARKAPSGRMSIVKNLQNLDPSHRISDRDYMGWMDF

SEQ ID NO: 1158 - protein, 1377 aa, Artificial Sequence
  Description of Artificial Sequence: Synthetic polypeptide
GTSTEPSEGSAPGSEPATSGSETPGSPAGSPTSTEEGSTSSTAESPGPGTSTPESGSASPGSTSESPSGTAPGSTSESPSGTAPGTSTPESGSASPGTSTPESGSASPGSEPATSGSETPGTSESATPESGPGSPAGSPTSTEEGTSTEPSEGSAPGTSESATPESGPGTSTEPSEGSAPGTSTEPSEGSAPGSPAGSPTSTEEGTSTEPSEGSAPGTSTEPSEGSAPGTSESATPESGPGTSESATPESGPGTSTEPSEGSAPGTSTEPSEGSAPGTSESATPESGPGTSTEPSEGSAPGSEPATSGSETPGSPAGSPTSTEEGSSTPSGATGSPGTPGSGTASSSPGSSTPSGATGSPGTSTEPSEGSAPGTSTEPSEGSAPGSEPATSGSETPGSPAGSPTSTEEGSPAGSPTSTEEGTSTEPSEGSAPGPEPTGPAPSGGSEPATSGSETPGTSESATPESGPGSPAGSPTSTEEGTSESATPESGPGSPAGSPTSTEEGSPAGSPTSTEEGTSESATPESGPGSPAGSPTSTEEGSPAGSPTSTEEGSTSSTAESPGPGSTSESPSGTAPGTSPSGESSTAPGSTSESPSGTAPGSTSESPSGTAPGTSPSGESSTAPGTSTEPSEGSAPGTSESATPESGPGTSESATPESGPGSEPATSGSETPGTSESATPESGPGTSESATPESGPGTSTEPSEGSAPGTSESATPESGPGTSTEPSEGSAPGTSPSGESSTAPGTSPSGESSTAPGTSPSGESSTAPGTSTEPSEGSAPGSPAGSPTSTEEGTSTEPSEGSAPGSSPSASTGTGPGSSTPSGATGSPGSSTPSGATGSPGSSTPSGATGSPGSSTPSGATGSPGASPGTSSTGSPGASASGAPSTGGTSPSGESSTAPGSTSSTAESPGPGTSPSGESSTAPGTSESATPESGPGTSTEPSEGSAPGTSTEPSEGSAPGSSPSASTGTGPGSSTPSGATGSPGASPGTSSTGSPGTSTPESGSASPGTSPSGESSTAPGTSPSGESSTAPGTSESATPESGPGSEPATSGSETPGTSTEPSEGSAPGSTSESPSGTAPGSTSESPSGTAPGTSTPESGSASPGSPAGSPTSTEEGTSESATPESGPGTSTEPSEGSAPGSPAGSPTSTEEGTSESATPESGPGSEPATSGSETPGSSTPSGATGSPGASPGTSSTGSPGSSTPSGATGSPGSTSESPSGTAPGTSPSGESSTAPGSTSSTAESPGPGSSTPSGATGSPGASPGTSSTGSPGTPGSGTASSSPGSPAGSPTSTEEGSPAGSPTSTEEGTSTEPSEGSAPGVSQRTDGESRAHLGALLARYIQQARKAPSGRMSIVKNLQNLDPSHRISDRDYMGWMDF

SEQ ID NO: 1159 - protein, 184 aa, Artificial Sequence
  Description of Artificial Sequence: Synthetic polypeptide
HSDGTFTSDLSKQMEEEAVRLFIEWLKNGGPSSGAPPPSGGSEPATSGSETPGTSESATPESGPGSEPATSGSETPGSPAGSPTSTEEGTSTEPSEGSAPGSEPATSGSETPGSEPATSGSETPGSEPATSGSETPGTSTEPSEGSAPGTSESATPESGPGSEPATSGSETPGTSTEPSEGSAP

SEQ ID NO: 1160 - protein, 184 aa, Artificial Sequence
  Description of Artificial Sequence: Synthetic polypeptide
HSDGTFTSDLSKQMEEEAVRLFIEWLKNGGPSSGAPPPSGGTSTPESGSASPGTSPSGESSTAPGTSPSGESSTAPGSTSSTAESPGPGSTSESPSGTAPGSTSSTAESPGPGTSPSGESSTAPGTSTPESGSASPGSTSSTAESPGPGTSPSGESSTAPGTSPSGESSTAPGTSPSGESSTAP

SEQ ID NO: 1161 - protein, 328 aa, Artificial Sequence
  Description of Artificial Sequence: Synthetic polypeptide
HSDGTFTSDLSKQMEEEAVRLFIEWLKNGGPSSGAPPPSGGTSESATPESGPGSEPATSGSETPGTSESATPESGPGSEPATSGSETPGTSESATPESGPGTSTEPSEGSAPGSPAGSPTSTEEGTSESATPESGPGSEPATSGSETPGTSESATPESGPGSPAGSPTSTEEGSPAGSPTSTEEGTSTEPSEGSAPGTSESATPESGPGTSESATPESGPGTSESATPESGPGSEPATSGSETPGSEPATSGSETPGSPAGSPTSTEEGTSTEPSEGSAPGTSTEPSEGSAPGSEPATSGSETPGTSESATPESGPGTSTEPSEGSAP

SEQ ID NO: 1162 - protein, 616 aa, Artificial Sequence
  Description of Artificial Sequence: Synthetic polypeptide
HSDGTFTSDLSKQMEEEAVRLFIEWLKNGGPSSGAPPPSGGSPAGSPTSTEEGTSESATPESGPGTSTEPSEGSAPGSPAGSPTSTEEGTSTEPSEGSAPGTSTEPSEGSAPGTSESATPESGPGSEPATSGSETPGSEPATSGSETPGSPAGSPTSTEEGTSESATPESGPGTSTEPSEGSAPGTSTEPSEGSAPGSPAGSPTSTEEGTSTEPSEGSAPGTSTEPSEGSAPGTSESATPESGPGTSTEPSEGSAPGTSESATPESGPGSEPATSGSETPGTSTEPSEGSAPGTSTEPSEGSAPGTSESATPESGPGTSESATPESGPGSPAGSPTSTEEGTSESATPESGPGSEPATSGSETPGTSESATPESGPGTSTEPSEGSAPGTSTEPSEGSAPGTSTEPSEGSAPGTSTEPSEGSAPGTSTEPSEGSAPGTSTEPSEGSAPGSPAGSPTSTEEGTSTEPSEGSAPGTSESATPESGPGSEPATSGSETPGTSESATPESGPGSEPATSGSETPGTSESATPESGPGTSTEPSEGSAPGTSESATPESGPGSPAGSPTSTEEGSPAGSPTSTEEGSPAGSPTSTEEGTSESATPESGPGTSTEPSEGSAP

SEQ ID NO: 1163 - protein, 616 aa, Artificial Sequence
  Description of Artificial Sequence: Synthetic polypeptide
HSDGTFTSDLSKQMEEEAVRLFIEWLKNGGPSSGAPPPSGGSTSSTAESPGPGSTSSTAESPGPGSTSESPSGTAPGSTSSTAESPGPGSTSSTAESPGPGTSTPESGSASPGSTSESPSGTAPGTSPSGESSTAPGSTSESPSGTAPGSTSESPSGTAPGTSPSGESSTAPGSTSESPSGTAPGSTSESPSGTAPGTSPSGESSTAPGSTSESPSGTAPGSTSESPSGTAPGSTSESPSGTAPGTSTPESGSASPGSTSESPSGTAPGTSTPESGSASPGSTSSTAESPGPGSTSSTAESPGPGTSTPESGSASPGTSTPESGSASPGSTSESPSGTAPGTSTPESGSASPGTSTPESGSASPGSTSESPSGTAPGSTSESPSGTAPGSTSESPSGTAPGSTSSTAESPGPGTSTPESGSASPGTSTPESGSASPGSTSESPSGTAPGSTSESPSGTAPGTSTPESGSASPGSTSESPSGTAPGSTSESPSGTAPGTSTPESGSASPGTSPSGESSTAPGSTSSTAESPGPGTSPSGESSTAPGSTSSTAESPGPGTSTPESGSASPGSTSESPSGTAPGSTSSTAESPGPGTSTPESGSASPGTSTPESGSASP

SEQ ID NO: 1164 - protein, 876 aa, Artificial Sequence
  Description of Artificial Sequence: Synthetic polypeptide
HSDGTFTSDLSKQMEEEAVRLFIEWLKNGGPSSGAPPPSGGSSESGSSEGGPGSSESGSSEGGPGESPGGSSGSESGSGGEPSESGSSGESPGGSSGSESGESPGGSSGSESGSSESGSSEGGPGSSESGSSEGGPGSSESGSSEGGPGESPGGSSGSESGESPGGSSGSESGESPGGSSGSESGSSESGSSEGGPGSSESGSSEGGPGSSESGSSEGGPGSSESGSSEGGPGSSESGSSEGGPGSSESGSSEGGPGSGGEPSESGSSGESPGGSSGSESGESPGGSSGSESGSGGEPSESGSSGSEGSSGPGESSGSSESGSSEGGPGSGGEPSESGSSGSEGSSGPGESSGSSESGSSEGGPGSGGEPSESGSSGESPGGSSGSESGSGGEPSESGSSGSGGEPSESGSSGSSESGSSEGGPGSGGEPSESGSSGSGGEPSESGSSGSEGSSGPGESSGESPGGSSGSESGSEGSSGPGESSGSEGSSGPGESSGSGGEPSESGSSGSSESGSSEGGPGSSESGSSEGGPGESPGGSSGSESGSGGEPSESGSSGSEGSSGPGESSGESPGGSSGSESGSEGSSGPGSSESGSSEGGPGSGGEPSESGSSGSEGSSGPGESSGSEGSSGPGESSGSEGSSGPGESSGSGGEPSESGSSGSGGEPSESGSSGESPGGSSGSESGESPGGSSGSESGSGGEPSESGSSGSEGSSGPGESSGESPGGSSGSESGSSESGSSEGGPGSSESGSSEGGPGSSESGSSEGGPGSGGEPSESGSSGSSESGSSEGGPGESPGGSSGSESGSGGEPSESGSSGSSESGSSEGGPGESPGGSSGSESGSGGEPSESGSSGESPGGSSGSESGSGGEPSESGSS

SEQ ID NO: 1165 - protein, 904 aa, Artificial Sequence
  Description of Artificial Sequence: Synthetic polypeptide
HSDGTFTSDLSKQMEEEAVRLFIEWLKNGGPSSGAPPPSGGSPAGSPTSTEEGTSESATPESGPGTSTEPSEGSAPGSPAGSPTSTEEGTSTEPSEGSAPGTSTEPSEGSAPGTSESATPESGPGSEPATSGSETPGSEPATSGSETPGSPAGSPTSTEEGTSESATPESGPGTSTEPSEGSAPGTSTEPSEGSAPGSPAGSPTSTEEGTSTEPSEGSAPGTSTEPSEGSAPGTSESATPESGPGTSTEPSEGSAPGTSESATPESGPGSEPATSGSETPGTSTEPSEGSAPGTSTEPSEGSAPGTSESATPESGPGTSESATPESGPGSPAGSPTSTEEGTSESATPESGPGSEPATSGSETPGTSESATPESGPGTSTEPSEGSAPGTSTEPSEGSAPGTSTEPSEGSAPGTSTEPSEGSAPGTSTEPSEGSAPGTSTEPSEGSAPGSPAGSPTSTEEGTSTEPSEGSAPGTSESATPESGPGSEPATSGSETPGTSESATPESGPGSEPATSGSETPGTSESATPESGPGTSTEPSEGSAPGTSESATPESGPGSPAGSPTSTEEGSPAGSPTSTEEGSPAGSPTSTEEGTSESATPESGPGTSTEPSEGSAPGTSESATPESGPGSEPATSGSETPGTSESATPESGPGSEPATSGSETPGTSESATPESGPGTSTEPSEGSAPGSPAGSPTSTEEGTSESATPESGPGSEPATSGSETPGTSESATPESGPGSPAGSPTSTEEGSPAGSPTSTEEGTSTEPSEGSAPGTSESATPESGPGTSESATPESGPGTSESATPESGPGSEPATSGSETPGSEPATSGSETPGSPAGSPTSTEEGTSTEPSEGSAPGTSTEPSEGSAPGSEPATSGSETPGTSESATPESGPGTSTEPSEGSAP

SEQ ID NO: 1166 - protein, 915 aa, Artificial Sequence
  Description of Artificial Sequence: Synthetic polypeptide
  MOD_RES (470)..(472): Any amino acid
  MOD_RES (483)..(486): Any amino acid
HSDGTFTSDLSKQMEEEAVRLFIEWLKNGGPSSGAPPPSGGSTSESPSGTAPGTSPSGESSTAPGSTSESPSGTAPGSTSESPSGTAPGTSTPESGSASPGTSTPESGSASPGSTSESPSGTAPGSTSESPSGTAPGTSPSGESSTAPGSTSESPSGTAPGTSPSGESSTAPGTSPSGESSTAPGSTSSTAESPGPGTSPSGESSTAPGTSPSGESSTAPGSTSSTAESPGPGTSTPESGSASPGTSTPESGSASPGSTSESPSGTAPGSTSESPSGTAPGTSTPESGSASPGSTSSTAESPGPGTSTPESGSASPGSTSESPSGTAPGTSPSGESSTAPGSTSSTAESPGPGTSPSGESSTAPGTSTPESGSASPGSTSSTAESPGPGSTSSTAESPGPGSTSSTAESPGPGSTSSTAESPGPGTSPSGESSTAPGSTSESPSGTAPGSTSESPSGTAPGTSTPESGPXXXGASASGAPSTXXXXSESPSGTAPGSTSESPSGTAPGSTSESPSGTAPGSTSESPSGTAPGSTSESPSGTAPGSTSESPSGTAPGTSTPESGSASPGTSPSGESSTAPGTSPSGESSTAPGSTSSTAESPGPGTSPSGESSTAPGTSTPESGSASPGSTSESPSGTAPGSTSESPSGTAPGTSPSGESSTAPGSTSESPSGTAPGTSTPESGSASPGTSTPESGSASPGSTSESPSGTAPGTSTPESGSASPGSTSSTAESPGPGSTSESPSGTAPGSTSESPSGTAPGTSPSGESSTAPGSTSSTAESPGPGTSPSGESSTAPGTSTPESGSASPGTSPSGESSTAPGTSPSGESSTAPGTSPSGESSTAPGSTSSTAESPGPGSTSSTAESPGPGTSPSGESSTAPGSSPSASTGTGPGSSTPSGATGSPGSSTPSGATGSP

SEQ ID NO: 1167 - protein, 904 aa, Artificial Sequence
  Description of Artificial Sequence: Synthetic polypeptide
HSDGTFTSDLSKQMEEEAVRLFIEWLKNGGPSSGAPPPSGGASPGTSSTGSPGSSPSASTGTGPGSSPSASTGTGPGTPGSGTASSSPGSSTPSGATGSPGSNPSASTGTGPGASPGTSSTGSPGTPGSGTASSSPGSSTPSGATGSPGTPGSGTASSSPGASPGTSSTGSPGASPGTSSTGSPGTPGSGTASSSPGSSTPSGATGSPGASPGTSSTGSPGTPGSGTASSSPGSSTPSGATGSPGSNPSASTGTGPGSSPSASTGTGPGSSTPSGATGSPGSSTPSGATGSPGASPGTSSTGSPGASPGTSSTGSPGASPGTSSTGSPGTPGSGTASSSPGASPGTSSTGSPGASPGTSSTGSPGASPGTSSTGSPGSSPSASTGTGPGTPGSGTASSSPGASPGTSSTGSPGASPGTSSTGSPGASPGTSSTGSPGSSTPSGATGSPGSSTPSGATGSPGASPGTSSTGSPGTPGSGTASSSPGSSTPSGATGSPGSSTPSGATGSPGSSTPSGATGSPGSSPSASTGTGPGASPGTSSTGSPGASPGTSSTGSPGTPGSGTASSSPGASPGTSSTGSPGASPGTSSTGSPGASPGTSSTGSPGASPGTSSTGSPGTPGSGTASSSPGSSTPSGATGSPGTPGSGTASSSPGSSTPSGATGSPGTPGSGTASSSPGSSTPSGATGSPGSSTPSGATGSPGSSPSASTGTGPGSSPSASTGTGPGASPGTSSTGSPGTPGSGTASSSPGSSTPSGATGSPGSSPSASTGTGPGSSPSASTGTGPGASPGTSSTGSPGASPGTSSTGSPGSSTPSGATGSPGSSPSASTGTGPGASPGTSSTGSPGSSPSASTGTGPGTPGSGTASSSPGSSTPSGATGSPGSSTPSGATGSPGASPGTSSTGSP

SEQ ID NO: 1168 - protein, 915 aa, Artificial Sequence
  Description of Artificial Sequence: Synthetic polypeptide
HSDGTFTSDLSKQMEEEAVRLFIEWLKNGGPSSGAPPPSGGTSTEPSEGSAPGSEPATSGSETPGSPAGSPTSTEEGSTSSTAESPGPGTSTPESGSASPGSTSESPSGTAPGSTSESPSGTAPGTSTPESGSASPGTSTPESGSASPGSEPATSGSETPGTSESATPESGPGSPAGSPTSTEEGTSTEPSEGSAPGTSESATPESGPGTSTEPSEGSAPGTSTEPSEGSAPGSPAGSPTSTEEGTSTEPSEGSAPGTSTEPSEGSAPGTSESATPESGPGTSESATPESGPGTSTEPSEGSAPGTSTEPSEGSAPGTSESATPESGPGTSTEPSEGSAPGSEPATSGSETPGSPAGSPTSTEEGSSTPSGATGSPGTPGSGTASSSPGSSTPSGATGSPGTSTEPSEGSAPGTSTEPSEGSAPGSEPATSGSETPGSPAGSPTSTEEGSPAGSPTSTEEGTSTEPSEGSAPGASASGAPSTGGTSESATPESGPGSPAGSPTSTEEGSPAGSPTSTEEGSTSSTAESPGPGSTSESPSGTAPGTSPSGESSTAPGTPGSGTASSSPGSSTPSGATGSPGSSPSASTGTGPGSEPATSGSETPGTSESATPESGPGSEPATSGSETPGSTSSTAESPGPGSTSSTAESPGPGTSPSGESSTAPGSEPATSGSETPGSEPATSGSETPGTSTEPSEGSAPGSTSSTAESPGPGTSTPESGSASPGSTSESPSGTAPGTSTEPSEGSAPGTSTEPSEGSAPGTSTEPSEGSAPGSSTPSGATGSPGSSPSASTGTGPGASPGTSSTGSPGSEPATSGSETPGTSESATPESGPGSPAGSPTSTEEGSSTPSGATGSPGSSPSASTGTGPGASPGTSSTGSPGTSESATPESGPGTSTEPSEGSAPGTSTEPSEGSAP

SEQ ID NO: 1169 - protein, 953 aa, Artificial Sequence
  Description of Artificial Sequence: Synthetic polypeptide
MAEPAGSPTSTEEGTPGSGTASSSPGSSTPSGATGSPGASPGTSSTGSPGSPAGSPTSTEEGTSESATPESGPGTSTEPSEGSAPGSPAGSPTSTEEGTSTEPSEGSAPGTSTEPSEGSAPGTSESATPESGPGSEPATSGSETPGSEPATSGSETPGSPAGSPTSTEEGTSESATPESGPGTSTEPSEGSAPGTSTEPSEGSAPGSPAGSPTSTEEGTSTEPSEGSAPGTSTEPSEGSAPGTSESATPESGPGTSTEPSEGSAPGTSESATPESGPGSEPATSGSETPGTSTEPSEGSAPGTSTEPSEGSAPGTSESATPESGPGTSESATPESGPGSPAGSPTSTEEGTSESATPESGPGSEPATSGSETPGTSESATPESGPGTSTEPSEGSAPGTSTEPSEGSAPGTSTEPSEGSAPGTSTEPSEGSAPGTSTEPSEGSAPGTSTEPSEGSAPGSPAGSPTSTEEGTSTEPSEGSAPGTSESATPESGPGSEPATSGSETPGTSESATPESGPGSEPATSGSETPGTSESATPESGPGTSTEPSEGSAPGTSESATPESGPGSPAGSPTSTEEGSPAGSPTSTEEGSPAGSPTSTEEGTSESATPESGPGTSTEPSEGSAPGTSESATPESGPGSEPATSGSETPGTSESATPESGPGSEPATSGSETPGTSESATPESGPGTSTEPSEGSAPGSPAGSPTSTEEGTSESATPESGPGSEPATSGSETPGTSESATPESGPGSPAGSPTSTEEGSPAGSPTSTEEGTSTEPSEGSAPGTSESATPESGPGTSESATPESGPGTSESATPESGPGSEPATSGSETPGSEPATSGSETPGSPAGSPTSTEEGTSTEPSEGSAPGTSTEPSEGSAPGSEPATSGSETPGTSESATPESGPGTSTEPSEGSAPGHSDGTFTSDLSKQMEEEAVRLFIEWLKNGGPSSGAPPPS

SEQ ID NO: 1170 - protein, 964 aa, Artificial Sequence
  Description of Artificial Sequence: Synthetic polypeptide
MAEPAGSPTSTEEGASPGTSSTGSPGSSTPSGATGSPGSSTPSGATGSPGTSTEPSEGSAPGSEPATSGSETPGSPAGSPTSTEEGSTSSTAESPGPGTSTPESGSASPGSTSESPSGTAPGSTSESPSGTAPGTSTPESGSASPGTSTPESGSASPGSEPATSGSETPGTSESATPESGPGSPAGSPTSTEEGTSTEPSEGSAPGTSESATPESGPGTSTEPSEGSAPGTSTEPSEGSAPGSPAGSPTSTEEGTSTEPSEGSAPGTSTEPSEGSAPGTSESATPESGPGTSESATPESGPGTSTEPSEGSAPGTSTEPSEGSAPGTSESATPESGPGTSTEPSEGSAPGSEPATSGSETPGSPAGSPTSTEEGSSTPSGATGSPGTPGSGTASSSPGSSTPSGATGSPGTSTEPSEGSAPGTSTEPSEGSAPGSEPATSGSETPGSPAGSPTSTEEGSPAGSPTSTEEGTSTEPSEGSAPGASASGAPSTGGTSESATPESGPGSPAGSPTSTEEGSPAGSPTSTEEGSTSSTAESPGPGSTSESPSGTAPGTSPSGESSTAPGTPGSGTASSSPGSSTPSGATGSPGSSPSASTGTGPGSEPATSGSETPGTSESATPESGPGSEPATSGSETPGSTSSTAESPGPGSTSSTAESPGPGTSPSGESSTAPGSEPATSGSETPGSEPATSGSETPGTSTEPSEGSAPGSTSSTAESPGPGTSTPESGSASPGSTSESPSGTAPGTSTEPSEGSAPGTSTEPSEGSAPGTSTEPSEGSAPGSSTPSGATGSPGSSPSASTGTGPGASPGTSSTGSPGSEPATSGSETPGTSESATPESGPGSPAGSPTSTEEGSSTPSGATGSPGSSPSASTGTGPGASPGTSSTGSPGTSESATPESGPGTSTEPSEGSAPGTSTEPSEGSAPGHSDGTFTSDLSKQMEEEAVRLFIEWLKNGGPSSGAPPPS

SEQ ID NO: 1171 - protein, 184 aa, Artificial Sequence
  Description of Artificial Sequence: Synthetic polypeptide
GSEPATSGSETPGTSESATPESGPGSEPATSGSETPGSPAGSPTSTEEGTSTEPSEGSAPGSEPATSGSETPGSEPATSGSETPGSEPATSGSETPGTSTEPSEGSAPGTSESATPESGPGSEPATSGSETPGTSTEPSEGSAPGHSDGTFTSDLSKQMEEEAVRLFIEWLKNGGPSSGAPPPS

SEQ ID NO: 1172 - protein, 184 aa, Artificial Sequence
  Description of Artificial Sequence: Synthetic polypeptide
GTSTPESGSASPGTSPSGESSTAPGTSPSGESSTAPGSTSSTAESPGPGSTSESPSGTAPGSTSSTAESPGPGTSPSGESSTAPGTSTPESGSASPGSTSSTAESPGPGTSPSGESSTAPGTSPSGESSTAPGTSPSGESSTAPGHSDGTFTSDLSKQMEEEAVRLFIEWLKNGGPSSGAPPPS

SEQ ID NO: 1173 - protein, 328 aa, Artificial Sequence
  Description of Artificial Sequence: Synthetic polypeptide
GTSESATPESGPGSEPATSGSETPGTSESATPESGPGSEPATSGSETPGTSESATPESGPGTSTEPSEGSAPGSPAGSPTSTEEGTSESATPESGPGSEPATSGSETPGTSESATPESGPGSPAGSPTSTEEGSPAGSPTSTEEGTSTEPSEGSAPGTSESATPESGPGTSESATPESGPGTSESATPESGPGSEPATSGSETPGSEPATSGSETPGSPAGSPTSTEEGTSTEPSEGSAPGTSTEPSEGSAPGSEPATSGSETPGTSESATPESGPGTSTEPSEGSAPGHSDGTFTSDLSKQMEEEAVRLFIEWLKNGGPSSGAPPPS

SEQ ID NO: 1174 - protein, 616 aa, Artificial Sequence
  Description of Artificial Sequence: Synthetic polypeptide
GSPAGSPTSTEEGTSESATPESGPGTSTEPSEGSAPGSPAGSPTSTEEGTSTEPSEGSAPGTSTEPSEGSAPGTSESATPESGPGSEPATSGSETPGSEPATSGSETPGSPAGSPTSTEEGTSESATPESGPGTSTEPSEGSAPGTSTEPSEGSAPGSPAGSPTSTEEGTSTEPSEGSAPGTSTEPSEGSAPGTSESATPESGPGTSTEPSEGSAPGTSESATPESGPGSEPATSGSETPGTSTEPSEGSAPGTSTEPSEGSAPGTSESATPESGPGTSESATPESGPGSPAGSPTSTEEGTSESATPESGPGSEPATSGSETPGTSESATPESGPGTSTEPSEGSAPGTSTEPSEGSAPGTSTEPSEGSAPGTSTEPSEGSAPGTSTEPSEGSAPGTSTEPSEGSAPGSPAGSPTSTEEGTSTEPSEGSAPGTSESATPESGPGSEPATSGSETPGTSESATPESGPGSEPATSGSETPGTSESATPESGPGTSTEPSEGSAPGTSESATPESGPGSPAGSPTSTEEGSPAGSPTSTEEGSPAGSPTSTEEGTSESATPESGPGTSTEPSEGSAPGHSDGTFTSDLSKQMEEEAVRLFIEWLKNGGPSSGAPPPS

SEQ ID NO: 1175 - protein, 616 aa, Artificial Sequence
  Description of Artificial Sequence: Synthetic polypeptide
GSTSSTAESPGPGSTSSTAESPGPGSTSESPSGTAPGSTSSTAESPGPGSTSSTAESPGPGTSTPESGSASPGSTSESPSGTAPGTSPSGESSTAPGSTSESPSGTAPGSTSESPSGTAPGTSPSGESSTAPGSTSESPSGTAPGSTSESPSGTAPGTSPSGESSTAPGSTSESPSGTAPGSTSESPSGTAPGSTSESPSGTAPGTSTPESGSASPGSTSESPSGTAPGTSTPESGSASPGSTSSTAESPGPGSTSSTAESPGPGTSTPESGSASPGTSTPESGSASPGSTSESPSGTAPGTSTPESGSASPGTSTPESGSASPGSTSESPSGTAPGSTSESPSGTAPGSTSESPSGTAPGSTSSTAESPGPGTSTPESGSASPGTSTPESGSASPGSTSESPSGTAPGSTSESPSGTAPGTSTPESGSASPGSTSESPSGTAPGSTSESPSGTAPGTSTPESGSASPGTSPSGESSTAPGSTSSTAESPGPGTSPSGESSTAPGSTSSTAESPGPGTSTPESGSASPGSTSESPSGTAPGSTSSTAESPGPGTSTPESGSASPGTSTPESGSASPGHSDGTFTSDLSKQMEEEAVRLFIEWLKNGGPSSGAPPPS

SEQ ID NO: 1176 - protein, 876 aa, Artificial Sequence
  Description of Artificial Sequence: Synthetic polypeptide
GSSESGSSEGGPGSSESGSSEGGPGESPGGSSGSESGSGGEPSESGSSGESPGGSSGSESGESPGGSSGSESGSSESGSSEGGPGSSESGSSEGGPGSSESGSSEGGPGESPGGSSGSESGESPGGSSGSESGESPGGSSGSESGSSESGSSEGGPGSSESGSSEGGPGSSESGSSEGGPGSSESGSSEGGPGSSESGSSEGGPGSSESGSSEGGPGSGGEPSESGSSGESPGGSSGSESGESPGGSSGSESGSGGEPSESGSSGSEGSSGPGESSGSSESGSSEGGPGSGGEPSESGSSGSEGSSGPGESSGSSESGSSEGGPGSGGEPSESGSSGESPGGSSGSESGSGGEPSESGSSGSGGEPSESGSSGSSESGSSEGGPGSGGEPSESGSSGSGGEPSESGSSGSEGSSGPGESSGESPGGSSGSESGSEGSSGPGESSGSEGSSGPGESSGSGGEPSESGSSGSSESGSSEGGPGSSESGSSEGGPGESPGGSSGSESGSGGEPSESGSSGSEGSSGPGESSGESPGGSSGSESGSEGSSGPGSSESGSSEGGPGSGGEPSESGSSGSEGSSGPGESSGSEGSSGPGESSGSEGSSGPGESSGSGGEPSESGSSGSGGEPSESGSSGESPGGSSGSESGESPGGSSGSESGSGGEPSESGSSGSEGSSGPGESSGESPGGSSGSESGSSESGSSEGGPGSSESGSSEGGPGSSESGSSEGGPGSGGEPSESGSSGSSESGSSEGGPGESPGGSSGSESGSGGEPSESGSSGSSESGSSEGGPGESPGGSSGSESGSGGEPSESGSSGESPGGSSGSESGSGGEPSESGSSGHSDGTFTSDLSKQMEEEAVRLFIEWLKNGGPSSGAPPPS

SEQ ID NO: 1177 - protein, 904 aa, Artificial Sequence
  Description of Artificial Sequence: Synthetic polypeptide
GSPAGSPTSTEEGTSESATPESGPGTSTEPSEGSAPGSPAGSPTSTEEGTSTEPSEGSAPGTSTEPSEGSAPGTSESATPESGPGSEPATSGSETPGSEPATSGSETPGSPAGSPTSTEEGTSESATPESGPGTSTEPSEGSAPGTSTEPSEGSAPGSPAGSPTSTEEGTSTEPSEGSAPGTSTEPSEGSAPGTSESATPESGPGTSTEPSEGSAPGTSESATPESGPGSEPATSGSETPGTSTEPSEGSAPGTSTEPSEGSAPGTSESATPESGPGTSESATPESGPGSPAGSPTSTEEGTSESATPESGPGSEPATSGSETPGTSESATPESGPGTSTEPSEGSAPGTSTEPSEGSAPGTSTEPSEGSAPGTSTEPSEGSAPGTSTEPSEGSAPGTSTEPSEGSAPGSPAGSPTSTEEGTSTEPSEGSAPGTSESATPESGPGSEPATSGSETPGTSESATPESGPGSEPATSGSETPGTSESATPESGPGTSTEPSEGSAPGTSESATPESGPGSPAGSPTSTEEGSPAGSPTSTEEGSPAGSPTSTEEGTSESATPESGPGTSTEPSEGSAPGTSESATPESGPGSEPATSGSETPGTSESATPESGPGSEPATSGSETPGTSESATPESGPGTSTEPSEGSAPGSPAGSPTSTEEGTSESATPESGPGSEPATSGSETPGTSESATPESGPGSPAGSPTSTEEGSPAGSPTSTEEGTSTEPSEGSAPGTSESATPESGPGTSESATPESGPGTSESATPESGPGSEPATSGSETPGSEPATSGSETPGSPAGSPTSTEEGTSTEPSEGSAPGTSTEPSEGSAPGSEPATSGSETPGTSESATPESGPGTSTEPSEGSAPGHSDGTFTSDLSKQMEEEAVRLFIEWLKNGGPSSGAPPPS

SEQ ID NO: 1178 - protein, 915 aa, Artificial Sequence
  Description of Artificial Sequence: Synthetic polypeptide
  MOD_RES (430)..(432): Any amino acid
  MOD_RES (443)..(446): Any amino acid
GSTSESPSGTAPGTSPSGESSTAPGSTSESPSGTAPGSTSESPSGTAPGTSTPESGSASPGTSTPESGSASPGSTSESPSGTAPGSTSESPSGTAPGTSPSGESSTAPGSTSESPSGTAPGTSPSGESSTAPGTSPSGESSTAPGSTSSTAESPGPGTSPSGESSTAPGTSPSGESSTAPGSTSSTAESPGPGTSTPESGSASPGTSTPESGSASPGSTSESPSGTAPGSTSESPSGTAPGTSTPESGSASPGSTSSTAESPGPGTSTPESGSASPGSTSESPSGTAPGTSPSGESSTAPGSTSSTAESPGPGTSPSGESSTAPGTSTPESGSASPGSTSSTAESPGPGSTSSTAESPGPGSTSSTAESPGPGSTSSTAESPGPGTSPSGESSTAPGSTSESPSGTAPGSTSESPSGTAPGTSTPESGPXXXGASASGAPSTXXXXSESPSGTAPGSTSESPSGTAPGSTSESPSGTAPGSTSESPSGTAPGSTSESPSGTAPGSTSESPSGTAPGTSTPESGSASPGTSPSGESSTAPGTSPSGESSTAPGSTSSTAESPGPGTSPSGESSTAPGTSTPESGSASPGSTSESPSGTAPGSTSESPSGTAPGTSPSGESSTAPGSTSESPSGTAPGTSTPESGSASPGTSTPESGSASPGSTSESPSGTAPGTSTPESGSASPGSTSSTAESPGPGSTSESPSGTAPGSTSESPSGTAPGTSPSGESSTAPGSTSSTAESPGPGTSPSGESSTAPGTSTPESGSASPGTSPSGESSTAPGTSPSGESSTAPGTSPSGESSTAPGSTSSTAESPGPGSTSSTAESPGPGTSPSGESSTAPGSSPSASTGTGPGSSTPSGATGSPGSSTPSGATGSPGHSDGTFTSDLSKQMEEEAVRLFIEWLKNGGPSSGAPPPS

SEQ ID NO: 1179 - protein, 904 aa, Artificial Sequence
  Description of Artificial Sequence: Synthetic polypeptide
GASPGTSSTGSPGSSPSASTGTGPGSSPSASTGTGPGTPGSGTASSSPGSSTPSGATGSPGSNPSASTGTGPGASPGTSSTGSPGTPGSGTASSSPGSSTPSGATGSPGTPGSGTASSSPGASPGTSSTGSPGASPGTSSTGSPGTPGSGTASSSPGSSTPSGATGSPGASPGTSSTGSPGTPGSGTASSSPGSSTPSGATGSPGSNPSASTGTGPGSSPSASTGTGPGSSTPSGATGSPGSSTPSGATGSPGASPGTSSTGSPGASPGTSSTGSPGASPGTSSTGSPGTPGSGTASSSPGASPGTSSTGSPGASPGTSSTGSPGASPGTSSTGSPGSSPSASTGTGPGTPGSGTASSSPGASPGTSSTGSPGASPGTSSTGSPGASPGTSSTGSPGSSTPSGATGSPGSSTPSGATGSPGASPGTSSTGSPGTPGSGTASSSPGSSTPSGATGSPGSSTPSGATGSPGSSTPSGATGSPGSSPSASTGTGPGASPGTSSTGSPGASPGTSSTGSPGTPGSGTASSSPGASPGTSSTGSPGASPGTSSTGSPGASPGTSSTGSPGASPGTSSTGSPGTPGSGTASSSPGSSTPSGATGSPGTPGSGTASSSPGSSTPSGATGSPGTPGSGTASSSPGSSTPSGATGSPGSSTPSGATGSPGSSPSASTGTGPGSSPSASTGTGPGASPGTSSTGSPGTPGSGTASSSPGSSTPSGATGSPGSSPSASTGTGPGSSPSASTGTGPGASPGTSSTGSPGASPGTSSTGSPGSSTPSGATGSPGSSPSASTGTGPGASPGTSSTGSPGSSPSASTGTGPGTPGSGTASSSPGSSTPSGATGSPGSSTPSGATGSPGASPGTSSTGSPGHSDGTFTSDLSKQMEEEAVRLFIEWLKNGGPSSGAPPPS

SEQ ID NO: 1180 - protein, 915 aa, Artificial Sequence
  Description of Artificial Sequence: Synthetic polypeptide
GTSTEPSEGSAPGSEPATSGSETPGSPAGSPTSTEEGSTSSTAESPGPGTSTPESGSASPGSTSESPSGTAPGSTSESPSGTAPGTSTPESGSASPGTSTPESGSASPGSEPATSGSETPGTSESATPESGPGSPAGSPTSTEEGTSTEPSEGSAPGTSESATPESGPGTSTEPSEGSAPGTSTEPSEGSAPGSPAGSPTSTEEGTSTEPSEGSAPGTSTEPSEGSAPGTSESATPESGPGTSESATPESGPGTSTEPSEGSAPGTSTEPSEGSAPGTSESATPESGPGTSTEPSEGSAPGSEPATSGSETPGSPAGSPTSTEEGSSTPSGATGSPGTPGSGTASSSPGSSTPSGATGSPGTSTEPSEGSAPGTSTEPSEGSAPGSEPATSGSETPGSPAGSPTSTEEGSPAGSPTSTEEGTSTEPSEGSAPGASASGAPSTGGTSESATPESGPGSPAGSPTSTEEGSPAGSPTSTEEGSTSSTAESPGPGSTSESPSGTAPGTSPSGESSTAPGTPGSGTASSSPGSSTPSGATGSPGSSPSASTGTGPGSEPATSGSETPGTSESATPESGPGSEPATSGSETPGSTSSTAESPGPGSTSSTAESPGPGTSPSGESSTAPGSEPATSGSETPGSEPATSGSETPGTSTEPSEGSAPGSTSSTAESPGPGTSTPESGSASPGSTSESPSGTAPGTSTEPSEGSAPGTSTEPSEGSAPGTSTEPSEGSAPGSSTPSGATGSPGSSPSASTGTGPGASPGTSSTGSPGSEPATSGSETPGTSESATPESGPGSPAGSPTSTEEGSSTPSGATGSPGSSPSASTGTGPGASPGTSSTGSPGTSESATPESGPGTSTEPSEGSAPGTSTEPSEGSAPGHSDGTFTSDLSKQMEEEAVRLFIEWLKNGGPSSGAPPPS

SEQ ID NO: 1181 - protein, 184 aa, Artificial Sequence
  Description of Artificial Sequence: Synthetic polypeptide
HGEGTFTSDLSKQMEEEAVRLFIEWLKNGGPSSGAPPPSGGSEPATSGSETPGTSESATPESGPGSEPATSGSETPGSPAGSPTSTEEGTSTEPSEGSAPGSEPATSGSETPGSEPATSGSETPGSEPATSGSETPGTSTEPSEGSAPGTSESATPESGPGSEPATSGSETPGTSTEPSEGSAP

SEQ ID NO: 1182 - protein, 184 aa, Artificial Sequence
  Description of Artificial Sequence: Synthetic polypeptide
HGEGTFTSDLSKQMEEEAVRLFIEWLKNGGPSSGAPPPSGGTSTPESGSASPGTSPSGESSTAPGTSPSGESSTAPGSTSSTAESPGPGSTSESPSGTAPGSTSSTAESPGPGTSPSGESSTAPGTSTPESGSASPGSTSSTAESPGPGTSPSGESSTAPGTSPSGESSTAPGTSPSGESSTAP

SEQ ID NO: 1183 - protein, 328 aa, Artificial Sequence
  Description of Artificial Sequence: Synthetic polypeptide
HGEGTFTSDLSKQMEEEAVRLFIEWLKNGGPSSGAPPPSGGTSESATPESGPGSEPATSGSETPGTSESATPESGPGSEPATSGSETPGTSESATPESGPGTSTEPSEGSAPGSPAGSPTSTEEGTSESATPESGPGSEPATSGSETPGTSESATPESGPGSPAGSPTSTEEGSPAGSPTSTEEGTSTEPSEGSAPGTSESATPESGPGTSESATPESGPGTSESATPESGPGSEPATSGSETPGSEPATSGSETPGSPAGSPTSTEEGTSTEPSEGSAPGTSTEPSEGSAPGSEPATSGSETPGTSESATPESGPGTSTEPSEGSAP

SEQ ID NO: 1184 - protein, 616 aa, Artificial Sequence
  Description of Artificial Sequence: Synthetic polypeptide
HGEGTFTSDLSKQMEEEAVRLFIEWLKNGGPSSGAPPPSGGSPAGSPTSTEEGTSESATPESGPGTSTEPSEGSAPGSPAGSPTSTEEGTSTEPSEGSAPGTSTEPSEGSAPGTSESATPESGPGSEPATSGSETPGSEPATSGSETPGSPAGSPTSTEEGTSESATPESGPGTSTEPSEGSAPGTSTEPSEGSAPGSPAGSPTSTEEGTSTEPSEGSAPGTSTEPSEGSAPGTSESATPESGPGTSTEPSEGSAPGTSESATPESGPGSEPATSGSETPGTSTEPSEGSAPGTSTEPSEGSAPGTSESATPESGPGTSESATPESGPGSPAGSPTSTEEGTSESATPESGPGSEPATSGSETPGTSESATPESGPGTSTEPSEGSAPGTSTEPSEGSAPGTSTEPSEGSAPGTSTEPSEGSAPGTSTEPSEGSAPGTSTEPSEGSAPGSPAGSPTSTEEGTSTEPSEGSAPGTSESATPESGPGSEPATSGSETPGTSESATPESGPGSEPATSGSETPGTSESATPESGPGTSTEPSEGSAPGTSESATPESGPGSPAGSPTSTEEGSPAGSPTSTEEGSPAGSPTSTEEGTSESATPESGPGTSTEPSEGSAP

SEQ ID NO: 1185 - protein, 616 aa, Artificial Sequence
  Description of Artificial Sequence: Synthetic polypeptide
HGEGTFTSDLSKQMEEEAVRLFIEWLKNGGPSSGAPPPSGGSTSSTAESPGPGSTSSTAESPGPGSTSESPSGTAPGSTSSTAESPGPGSTSSTAESPGPGTSTPESGSASPGSTSESPSGTAPGTSPSGESSTAPGSTSESPSGTAPGSTSESPSGTAPGTSPSGESSTAPGSTSESPSGTAPGSTSESPSGTAPGTSPSGESSTAPGSTSESPSGTAPGSTSESPSGTAPGSTSESPSGTAPGTSTPESGSASPGSTSESPSGTAPGTSTPESGSASPGSTSSTAESPGPGSTSSTAESPGPGTSTPESGSASPGTSTPESGSASPGSTSESPSGTAPGTSTPESGSASPGTSTPESGSASPGSTSESPSGTAPGSTSESPSGTAPGSTSESPSGTAPGSTSSTAESPGPGTSTPESGSASPGTSTPESGSASPGSTSESPSGTAPGSTSESPSGTAPGTSTPESGSASPGSTSESPSGTAPGSTSESPSGTAPGTSTPESGSASPGTSPSGESSTAPGSTSSTAESPGPGTSPSGESSTAPGSTSSTAESPGPGTSTPESGSASPGSTSESPSGTAPGSTSSTAESPGPGTSTPESGSASPGTSTPESGSASP

SEQ ID NO: 1186 - protein, 876 aa, Artificial Sequence
  Description of Artificial Sequence: Synthetic polypeptide
HGEGTFTSDLSKQMEEEAVRLFIEWLKNGGPSSGAPPPSGGSSESGSSEGGPGSSESGSSEGGPGESPGGSSGSESGSGGEPSESGSSGESPGGSSGSESGESPGGSSGSESGSSESGSSEGGPGSSESGSSEGGPGSSESGSSEGGPGESPGGSSGSESGESPGGSSGSESGESPGGSSGSESGSSESGSSEGGPGSSESGSSEGGPGSSESGSSEGGPGSSESGSSEGGPGSSESGSSEGGPGSSESGSSEGGPGSGGEPSESGSSGESPGGSSGSESGESPGGSSGSESGSGGEPSESGSSGSEGSSGPGESSGSSESGSSEGGPGSGGEPSESGSSGSEGSSGPGESSGSSESGSSEGGPGSGGEPSESGSSGESPGGSSGSESGSGGEPSESGSSGSGGEPSESGSSGSSESGSSEGGPGSGGEPSESGSSGSGGEPSESGSSGSEGSSGPGESSGESPGGSSGSESGSEGSSGPGESSGSEGSSGPGESSGSGGEPSESGSSGSSESGSSEGGPGSSESGSSEGGPGESPGGSSGSESGSGGEPSESGSSGSEGSSGPGESSGESPGGSSGSESGSEGSSGPGSSESGSSEGGPGSGGEPSESGSSGSEGSSGPGESSGSEGSSGPGESSGSEGSSGPGESSGSGGEPSESGSSGSGGEPSESGSSGESPGGSSGSESGESPGGSSGSESGSGGEPSESGSSGSEGSSGPGESSGESPGGSSGSESGSSESGSSEGGPGSSESGSSEGGPGSSESGSSEGGPGSGGEPSESGSSGSSESGSSEGGPGESPGGSSGSESGSGGEPSESGSSGSSESGSSEGGPGESPGGSSGSESGSGGEPSESGSSGESPGGSSGSESGSGGEPSESGSS

SEQ ID NO: 1187 - protein, 904 aa, Artificial Sequence
  Description of Artificial Sequence: Synthetic polypeptide
HGEGTFTSDLSKQMEEEAVRLFIEWLKNGGPSSGAPPPSGGSPAGSPTSTEEGTSESATPESGPGTSTEPSEGSAPGSPAGSPTSTEEGTSTEPSEGSAPGTSTEPSEGSAPGTSESATPESGPGSEPATSGSETPGSEPATSGSETPGSPAGSPTSTEEGTSESATPESGPGTSTEPSEGSAPGTSTEPSEGSAPGSPAGSPTSTEEGTSTEPSEGSAPGTSTEPSEGSAPGTSESATPESGPGTSTEPSEGSAPGTSESATPESGPGSEPATSGSETPGTSTEPSEGSAPGTSTEPSEGSAPGTSESATPESGPGTSESATPESGPGSPAGSPTSTEEGTSESATPESGPGSEPATSGSETPGTSESATPESGPGTSTEPSEGSAPGTSTEPSEGSAPGTSTEPSEGSAPGTSTEPSEGSAPGTSTEPSEGSAPGTSTEPSEGSAPGSPAGSPTSTEEGTSTEPSEGSAPGTSESATPESGPGSEPATSGSETPGTSESATPESGPGSEPATSGSETPGTSESATPESGPGTSTEPSEGSAPGTSESATPESGPGSPAGSPTSTEEGSPAGSPTSTEEGSPAGSPTSTEEGTSESATPESGPGTSTEPSEGSAPGTSESATPESGPGSEPATSGSETPGTSESATPESGPGSEPATSGSETPGTSESATPESGPGTSTEPSEGSAPGSPAGSPTSTEEGTSESATPESGPGSEPATSGSETPGTSESATPESGPGSPAGSPTSTEEGSPAGSPTSTEEGTSTEPSEGSAPGTSESATPESGPGTSESATPESGPGTSESATPESGPGSEPATSGSETPGSEPATSGSETPGSPAGSPTSTEEGTSTEPSEGSAPGTSTEPSEGSAPGSEPATSGSETPGTSESATPESGPGTSTEPSEGSAP

SEQ ID NO: 1188 - protein, 915 aa, Artificial Sequence
  Description of Artificial Sequence: Synthetic polypeptide
  MOD_RES (470)..(472): Any amino acid
  MOD_RES (483)..(486): Any amino acid
HGEGTFTSDLSKQMEEEAVRLFIEWLKNGGPSSGAPPPSGGSTSESPSGTAPGTSPSGESSTAPGSTSESPSGTAPGSTSESPSGTAPGTSTPESGSASPGTSTPESGSASPGSTSESPSGTAPGSTSESPSGTAPGTSPSGESSTAPGSTSESPSGTAPGTSPSGESSTAPGTSPSGESSTAPGSTSSTAESPGPGTSPSGESSTAPGTSPSGESSTAPGSTSSTAESPGPGTSTPESGSASPGTSTPESGSASPGSTSESPSGTAPGSTSESPSGTAPGTSTPESGSASPGSTSSTAESPGPGTSTPESGSASPGSTSESPSGTAPGTSPSGESSTAPGSTSSTAESPGPGTSPSGESSTAPGTSTPESGSASPGSTSSTAESPGPGSTSSTAESPGPGSTSSTAESPGPGSTSSTAESPGPGTSPSGESSTAPGSTSESPSGTAPGSTSESPSGTAPGTSTPESGPXXXGASASGAPSTXXXXSESPSGTAPGSTSESPSGTAPGSTSESPSGTAPGSTSESPSGTAPGSTSESPSGTAPGSTSESPSGTAPGTSTPESGSASPGTSPSGESSTAPGTSPSGESSTAPGSTSSTAESPGPGTSPSGESSTAPGTSTPESGSASPGSTSESPSGTAPGSTSESPSGTAPGTSPSGESSTAPGSTSESPSGTAPGTSTPESGSASPGTSTPESGSASPGSTSESPSGTAPGTSTPESGSASPGSTSSTAESPGPGSTSESPSGTAPGSTSESPSGTAPGTSPSGESSTAPGSTSSTAESPGPGTSPSGESSTAPGTSTPESGSASPGTSPSGESSTAPGTSPSGESSTAPGTSPSGESSTAPGSTSSTAESPGPGSTSSTAESPGPGTSPSGESSTAPGSSPSASTGTGPGSSTPSGATGSPGSSTPSGATGSP

SEQ ID NO: 1189 - protein, 904 aa, Artificial Sequence
  Description of Artificial Sequence: Synthetic polypeptide
HGEGTFTSDLSKQMEEEAVRLFIEWLKNGGPSSGAPPPSGGASPGTSSTGSPGSSPSASTGTGPGSSPSASTGTGPGTPGSGTASSSPGSSTPSGATGSPGSNPSASTGTGPGASPGTSSTGSPGTPGSGTASSSPGSSTPSGATGSPGTPGSGTASSSPGASPGTSSTGSPGASPGTSSTGSPGTPGSGTASSSPGSSTPSGATGSPGASPGTSSTGSPGTPGSGTASSSPGSSTPSGATGSPGSNPSASTGTGPGSSPSASTGTGPGSSTPSGATGSPGSSTPSGATGSPGASPGTSSTGSPGASPGTSSTGSPGASPGTSSTGSPGTPGSGTASSSPGASPGTSSTGSPGASPGTSSTGSPGASPGTSSTGSPGSSPSASTGTGPGTPGSGTASSSPGASPGTSSTGSPGASPGTSSTGSPGASPGTSSTGSPGSSTPSGATGSPGSSTPSGATGSPGASPGTSSTGSPGTPGSGTASSSPGSSTPSGATGSPGSSTPSGATGSPGSSTPSGATGSPGSSPSASTGTGPGASPGTSSTGSPGASPGTSSTGSPGTPGSGTASSSPGASPGTSSTGSPGASPGTSSTGSPGASPGTSSTGSPGASPGTSSTGSPGTPGSGTASSSPGSSTPSGATGSPGTPGSGTASSSPGSSTPSGATGSPGTPGSGTASSSPGSSTPSGATGSPGSSTPSGATGSPGSSPSASTGTGPGSSPSASTGTGPGASPGTSSTGSPGTPGSGTASSSPGSSTPSGATGSPGSSPSASTGTGPGSSPSASTGTGPGASPGTSSTGSPGASPGTSSTGSPGSSTPSGATGSPGSSPSASTGTGPGASPGTSSTGSPGSSPSASTGTGPGTPGSGTASSSPGSSTPSGATGSPGSSTPSGATGSPGASPGTSSTGSP

SEQ ID NO: 1190 - protein, 915 aa, Artificial Sequence
  Description of Artificial Sequence: Synthetic polypeptide
HGEGTFTSDLSKQMEEEAVRLFIEWLKNGGPSSGAPPPSGGTSTEPSEGSAPGSEPATSGSETPGSPAGSPTSTEEGSTSSTAESPGPGTSTPESGSASPGSTSESPSGTAPGSTSESPSGTAPGTSTPESGSASPGTSTPESGSASPGSEPATSGSETPGTSESATPESGPGSPAGSPTSTEEGTSTEPSEGSAPGTSESATPESGPGTSTEPSEGSAPGTSTEPSEGSAPGSPAGSPTSTEEGTSTEPSEGSAPGTSTEPSEGSAPGTSESATPESGPGTSESATPESGPGTSTEPSEGSAPGTSTEPSEGSAPGTSESATPESGPGTSTEPSEGSAPGSEPATSGSETPGSPAGSPTSTEEGSSTPSGATGSPGTPGSGTASSSPGSSTPSGATGSPGTSTEPSEGSAPGTSTEPSEGSAPGSEPATSGSETPGSPAGSPTSTEEGSPAGSPTSTEEGTSTEPSEGSAPGASASGAPSTGGTSESATPESGPGSPAGSPTSTEEGSPAGSPTSTEEGSTSSTAESPGPGSTSESPSGTAPGTSPSGESSTAPGTPGSGTASSSPGSSTPSGATGSPGSSPSASTGTGPGSEPATSGSETPGTSESATPESGPGSEPATSGSETPGSTSSTAESPGPGSTSSTAESPGPGTSPSGESSTAPGSEPATSGSETPGSEPATSGSETPGTSTEPSEGSAPGSTSSTAESPGPGTSTPESGSASPGSTSESPSGTAPGTSTEPSEGSAPGTSTEPSEGSAPGTSTEPSEGSAPGSSTPSGATGSPGSSPSASTGTGPGASPGTSSTGSPGSEPATSGSETPGTSESATPESGPGSPAGSPTSTEEGSSTPSGATGSPGSSPSASTGTGPGASPGTSSTGSPGTSESATPESGPGTSTEPSEGSAPGTSTEPSEGSAP

SEQ ID NO: 1191 - protein, 1358 aa, Artificial Sequence
  Description of Artificial Sequence: Synthetic polypeptide
HGEGTFTSDLSKQMEEEAVRLFIEWLKNGGPSSGAPPPSGGTSTEPSEGSAPGSEPATSGSETPGSPAGSPTSTEEGSTSSTAESPGPGTSTPESGSASPGSTSESPSGTAPGSTSESPSGTAPGTSTPESGSASPGTSTPESGSASPGSEPATSGSETPGTSESATPESGPGSPAGSPTSTEEGTSTEPSEGSAPGTSESATPESGPGTSTEPSEGSAPGTSTEPSEGSAPGSPAGSPTSTEEGTSTEPSEGSAPGTSTEPSEGSAPGTSESATPESGPGTSESATPESGPGTSTEPSEGSAPGTSTEPSEGSAPGTSESATPESGPGTSTEPSEGSAPGSEPATSGSETPGSPAGSPTSTEEGSSTPSGATGSPGTPGSGTASSSPGSSTPSGATGSPGTSTEPSEGSAPGTSTEPSEGSAPGSEPATSGSETPGSPAGSPTSTEEGSPAGSPTSTEEGTSTEPSEGSAPGPEPTGPAPSGGSEPATSGSETPGTSESATPESGPGSPAGSPTSTEEGTSESATPESGPGSPAGSPTSTEEGSPAGSPTSTEEGTSESATPESGPGSPAGSPTSTEEGSPAGSPTSTEEGSTSSTAESPGPGSTSESPSGTAPGTSPSGESSTAPGSTSESPSGTAPGSTSESPSGTAPGTSPSGESSTAPGTSTEPSEGSAPGTSESATPESGPGTSESATPESGPGSEPATSGSETPGTSESATPESGPGTSESATPESGPGTSTEPSEGSAPGTSESATPESGPGTSTEPSEGSAPGTSPSGESSTAPGTSPSGESSTAPGTSPSGESSTAPGTSTEPSEGSAPGSPAGSPTSTEEGTSTEPSEGSAPGSSPSASTGTGPGSSTPSGATGSPGSSTPSGATGSPGSSTPSGATGSPGSSTPSGATGSPGASPGTSSTGSPGASASGAPSTGGTSPSGESSTAPGSTSSTAESPGPGTSPSGESSTAPGTSESATPESGPGTSTEPSEGSAPGTSTEPSEGSAPGSSPSASTGTGPGSSTPSGATGSPGASPGTSSTGSPGTSTPESGSASPGTSPSGESSTAPGTSPSGESSTAPGTSESATPESGPGSEPATSGSETPGTSTEPSEGSAPGSTSESPSGTAPGSTSESPSGTAPGTSTPESGSASPGSPAGSPTSTEEGTSESATPESGPGTSTEPSEGSAPGSPAGSPTSTEEGTSESATPESGPGSEPATSGSETPGSSTPSGATGSPGASPGTSSTGSPGSSTPSGATGSPGSTSESPSGTAPGTSPSGESSTAPGSTSSTAESPGPGSSTPSGATGSPGASPGTSSTGSPGTPGSGTASSSPGSPAGSPTSTEEGSPAGSPTSTEEGTSTEPSEGSAP

SEQ ID NO: 1192 - protein, 953 aa, Artificial Sequence
  Description of Artificial Sequence: Synthetic polypeptide
MAEPAGSPTSTEEGTPGSGTASSSPGSSTPSGATGSPGASPGTSSTGSPGSPAGSPTSTEEGTSESATPESGPGTSTEPSEGSAPGSPAGSPTSTEEGTSTEPSEGSAPGTSTEPSEGSAPGTSESATPESGPGSEPATSGSETPGSEPATSGSETPGSPAGSPTSTEEGTSESATPESGPGTSTEPSEGSAPGTSTEPSEGSAPGSPAGSPTSTEEGTSTEPSEGSAPGTSTEPSEGSAPGTSESATPESGPGTSTEPSEGSAPGTSESATPESGPGSEPATSGSETPGTSTEPSEGSAPGTSTEPSEGSAPGTSESATPESGPGTSESATPESGPGSPAGSPTSTEEGTSESATPESGPGSEPATSGSETPGTSESATPESGPGTSTEPSEGSAPGTSTEPSEGSAPGTSTEPSEGSAPGTSTEPSEGSAPGTSTEPSEGSAPGTSTEPSEGSAPGSPAGSPTSTEEGTSTEPSEGSAPGTSESATPESGPGSEPATSGSETPGTSESATPESGPGSEPATSGSETPGTSESATPESGPGTSTEPSEGSAPGTSESATPESGPGSPAGSPTSTEEGSPAGSPTSTEEGSPAGSPTSTEEGTSESATPESGPGTSTEPSEGSAPGTSESATPESGPGSEPATSGSETPGTSESATPESGPGSEPATSGSETPGTSESATPESGPGTSTEPSEGSAPGSPAGSPTSTEEGTSESATPESGPGSEPATSGSETPGTSESATPESGPGSPAGSPTSTEEGSPAGSPTSTEEGTSTEPSEGSAPGTSESATPESGPGTSESATPESGPGTSESATPESGPGSEPATSGSETPGSEPATSGSETPGSPAGSPTSTEEGTSTEPSEGSAPGTSTEPSEGSAPGSEPATSGSETPGTSESATPESGPGTSTEPSEGSAPGHGEGTFTSDLSKQMEEEAVRLFIEWLKNGGPSSGAPPPS

SEQ ID NO: 1193 - protein, 964 aa, Artificial Sequence
  Description of Artificial Sequence: Synthetic polypeptide
MAEPAGSPTSTEEGASPGTSSTGSPGSSTPSGATGSPGSSTPSGATGSPGTSTEPSEGSAPGSEPATSGSETPGSPAGSPTSTEEGSTSSTAESPGPGTSTPESGSASPGSTSESPSGTAPGSTSESPSGTAPGTSTPESGSASPGTSTPESGSASPGSEPATSGSETPGTSESATPESGPGSPAGSPTSTEEGTSTEPSEGSAPGTSESATPESGPGTSTEPSEGSAPGTSTEPSEGSAPGSPAGSPTSTEEGTSTEPSEGSAPGTSTEPSEGSAPGTSESATPESGPGTSESATPESGPGTSTEPSEGSAPGTSTEPSEGSAPGTSESATPESGPGTSTEPSEGSAPGSEPATSGSETPGSPAGSPTSTEEGSSTPSGATGSPGTPGSGTASSSPGSSTPSGATGSPGTSTEPSEGSAPGTSTEPSEGSAPGSEPATSGSETPGSPAGSPTSTEEGSPAGSPTSTEEGTSTEPSEGSAPGASASGAPSTGGTSESATPESGPGSPAGSPTSTEEGSPAGSPTSTEEGSTSSTAESPGPGSTSESPSGTAPGTSPSGESSTAPGTPGSGTASSSPGSSTPSGATGSPGSSPSASTGTGPGSEPATSGSETPGTSESATPESGPGSEPATSGSETPGSTSSTAESPGPGSTSSTAESPGPGTSPSGESSTAPGSEPATSGSETPGSEPATSGSETPGTSTEPSEGSAPGSTSSTAESPGPGTSTPESGSASPGSTSESPSGTAPGTSTEPSEGSAPGTSTEPSEGSAPGTSTEPSEGSAPGSSTPSGATGSPGSSPSASTGTGPGASPGTSSTGSPGSEPATSGSETPGTSESATPESGPGSPAGSPTSTEEGSSTPSGATGSPGSSPSASTGTGPGASPGTSSTGSPGTSESATPESGPGTSTEPSEGSAPGTSTEPSEGSAPGHGEGTFTSDLSKQMEEEAVRLFIEWLKNGGPSSGAPPPS

SEQ ID NO: 1194 - protein, 184 aa, Artificial Sequence
  Description of Artificial Sequence: Synthetic polypeptide
GSEPATSGSETPGTSESATPESGPGSEPATSGSETPGSPAGSPTSTEEGTSTEPSEGSAPGSEPATSGSETPGSEPATSGSETPGSEPATSGSETPGTSTEPSEGSAPGTSESATPESGPGSEPATSGSETPGTSTEPSEGSAPGHGEGTFTSDLSKQMEEEAVRLFIEWLKNGGPSSGAPPPS

SEQ ID NO: 1195 - protein, 184 aa, Artificial Sequence
  Description of Artificial Sequence: Synthetic polypeptide
GTSTPESGSASPGTSPSGESSTAPGTSPSGESSTAPGSTSSTAESPGPGSTSESPSGTAPGSTSSTAESPGPGTSPSGESSTAPGTSTPESGSASPGSTSSTAESPGPGTSPSGESSTAPGTSPSGESSTAPGTSPSGESSTAPGHGEGTFTSDLSKQMEEEAVRLFIEWLKNGGPSSGAPPPS

SEQ ID NO: 1196 - protein, 328 aa, Artificial Sequence
  Description of Artificial Sequence: Synthetic polypeptide
GTSESATPESGPGSEPATSGSETPGTSESATPESGPGSEPATSGSETPGTSESATPESGPGTSTEPSEGSAPGSPAGSPTSTEEGTSESATPESGPGSEPATSGSETPGTSESATPESGPGSPAGSPTSTEEGSPAGSPTSTEEGTSTEPSEGSAPGTSESATPESGPGTSESATPESGPGTSESATPESGPGSEPATSGSETPGSEPATSGSETPGSPAGSPTSTEEGTSTEPSEGSAPGTSTEPSEGSAPGSEPATSGSETPGTSESATPESGPGTSTEPSEGSAPGHGEGTFTSDLSKQMEEEAVRLFIEWLKNGGPSSGAPPPS

SEQ ID NO: 1197 - protein, 616 aa, Artificial Sequence
  Description of Artificial Sequence: Synthetic polypeptide
GSPAGSPTSTEEGTSESATPESGPGTSTEPSEGSAPGSPAGSPTSTEEGTSTEPSEGSAPGTSTEPSEGSAPGTSESATPESGPGSEPATSGSETPGSEPATSGSETPGSPAGSPTSTEEGTSESATPESGPGTSTEPSEGSAPGTSTEPSEGSAPGSPAGSPTSTEEGTSTEPSEGSAPGTSTEPSEGSAPGTSESATPESGPGTSTEPSEGSAPGTSESATPESGPGSEPATSGSETPGTSTEPSEGSAPGTSTEPSEGSAPGTSESATPESGPGTSESATPESGPGSPAGSPTSTEEGTSESATPESGPGSEPATSGSETPGTSESATPESGPGTSTEPSEGSAPGTSTEPSEGSAPGTSTEPSEGSAPGTSTEPSEGSAPGTSTEPSEGSAPGTSTEPSEGSAPGSPAGSPTSTEEGTSTEPSEGSAPGTSESATPESGPGSEPATSGSETPGTSESATPESGPGSEPATSGSETPGTSESATPESGPGTSTEPSEGSAPGTSESATPESGPGSPAGSPTSTEEGSPAGSPTSTEEGSPAGSPTSTEEGTSESATPESGPGTSTEPSEGSAPGHGEGTFTSDLSKQMEEEAVRLFIEWLKNGGPSSGAPPPS

SEQ ID NO: 1198 - protein, 616 aa, Artificial Sequence
  Description of Artificial Sequence: Synthetic polypeptide
GSTSSTAESPGPGSTSSTAESPGPGSTSESPSGTAPGSTSSTAESPGPGSTSSTAESPGPGTSTPESGSASPGSTSESPSGTAPGTSPSGESSTAPGSTSESPSGTAPGSTSESPSGTAPGTSPSGESSTAPGSTSESPSGTAPGSTSESPSGTAPGTSPSGESSTAPGSTSESPSGTAPGSTSESPSGTAPGSTSESPSGTAPGTSTPESGSASPGSTSESPSGTAPGTSTPESGSASPGSTSSTAESPGPGSTSSTAESPGPGTSTPESGSASPGTSTPESGSASPGSTSESPSGTAPGTSTPESGSASPGTSTPESGSASPGSTSESPSGTAPGSTSESPSGTAPGSTSESPSGTAPGSTSSTAESPGPGTSTPESGSASPGTSTPESGSASPGSTSESPSGTAPGSTSESPSGTAPGTSTPESGSASPGSTSESPSGTAPGSTSESPSGTAPGTSTPESGSASPGTSPSGESSTAPGSTSSTAESPGPGTSPSGESSTAPGSTSSTAESPGPGTSTPESGSASPGSTSESPSGTAPGSTSSTAESPGPGTSTPESGSASPGTSTPESGSASPGHGEGTFTSDLSKQMEEEAVRLFIEWLKNGGPSSGAPPPS

SEQ ID NO: 1199 - protein, 876 aa, Artificial Sequence
  Description of Artificial Sequence: Synthetic polypeptide
GSSESGSSEGGPGSSESGSSEGGPGESPGGSSGSESGSGGEPSESGSSGESPGGSSGSESGESPGGSSGSESGSSESGSSEGGPGSSESGSSEGGPGSSESGSSEGGPGESPGGSSGSESGESPGGSSGSESGESPGGSSGSESGSSESGSSEGGPGSSESGSSEGGPGSSESGSSEGGPGSSESGSSEGGPGSSESGSSEGGPGSSESGSSEGGPGSGGEPSESGSSGESPGGSSGSESGESPGGSSGSESGSGGEPSESGSSGSEGSSGPGESSGSSESGSSEGGPGSGGEPSESGSSGSEGSSGPGESSGSSESGSSEGGPGSGGEPSESGSSGESPGGSSGSESGSGGEPSESGSSGSGGEPSESGSSGSSESGSSEGGPGSGGEPSESGSSGSGGEPSESGSSGSEGSSGPGESSGESPGGSSGSESGSEGSSGPGESSGSEGSSGPGESSGSGGEPSESGSSGSSESGSSEGGPGSSESGSSEGGPGESPGGSSGSESGSGGEPSESGSSGSEGSSGPGESSGESPGGSSGSESGSEGSSGPGSSESGSSEGGPGSGGEPSESGSSGSEGSSGPGESSGSEGSSGPGESSGSEGSSGPGESSGSGGEPSESGSSGSGGEPSESGSSGESPGGSSGSESGESPGGSSGSESGSGGEPSESGSSGSEGSSGPGESSGESPGGSSGSESGSSESGSSEGGPGSSESGSSEGGPGSSESGSSEGGPGSGGEPSESGSSGSSESGSSEGGPGESPGGSSGSESGSGGEPSESGSSGSSESGSSEGGPGESPGGSSGSESGSGGEPSESGSSGESPGGSSGSESGSGGEPSESGSSGHGEGTFTSDLSKQMEEEAVRLFIEWLKNGGPSSGAPPPS

SEQ ID NO: 1200 - protein, 904 aa, Artificial Sequence
  Description of Artificial Sequence: Synthetic polypeptide
GSPAGSPTSTEEGTSESATPESGPGTSTEPSEGSAPGSPAGSPTSTEEGTSTEPSEGSAPGTSTEPSEGSAPGTSESATPESGPGSEPATSGSETPGSEPATSGSETPGSPAGSPTSTEEGTSESATPESGPGTSTEPSEGSAPGTSTEPSEGSAPGSPAGSPTSTEEGTSTEPSEGSAPGTSTEPSEGSAPGTSESATPESGPGTSTEPSEGSAPGTSESATPESGPGSEPATSGSETPGTSTEPSEGSAPGTSTEPSEGSAPGTSESATPESGPGTSESATPESGPGSPAGSPTSTEEGTSESATPESGPGSEPATSGSETPGTSESATPESGPGTSTEPSEGSAPGTSTEPSEGSAPGTSTEPSEGSAPGTSTEPSEGSAPGTSTEPSEGSAPGTSTEPSEGSAPGSPAGSPTSTEEGTSTEPSEGSAPGTSESATPESGPGSEPATSGSETPGTSESATPESGPGSEPATSGSETPGTSESATPESGPGTSTEPSEGSAPGTSESATPESGPGSPAGSPTSTEEGSPAGSPTSTEEGSPAGSPTSTEEGTSESATPESGPGTSTEPSEGSAPGTSESATPESGPGSEPATSGSETPGTSESATPESGPGSEPATSGSETPGTSESATPESGPGTSTEPSEGSAPGSPAGSPTSTEEGTSESATPESGPGSEPATSGSETPGTSESATPESGPGSPAGSPTSTEEGSPAGSPTSTEEGTSTEPSEGSAPGTSESATPESGPGTSESATPESGPGTSESATPESGPGSEPATSGSETPGSEPATSGSETPGSPAGSPTSTEEGTSTEPSEGSAPGTSTEPSEGSAPGSEPATSGSETPGTSESATPESGPGTSTEPSEGSAPGHGEGTFTSDLSKQMEEEAVRLFIEWLKNGGPSSGAPPPS

SEQ ID NO: 1201 - protein, 915 aa, Artificial Sequence
  Description of Artificial Sequence: Synthetic polypeptide
  MOD_RES (430)..(432): Any amino acid
  MOD_RES (443)..(446): Any amino acid
GSTSESPSGTAPGTSPSGESSTAPGSTSESPSGTAPGSTSESPSGTAPGTSTPESGSASPGTSTPESGSASPGSTSESPSGTAPGSTSESPSGTAPGTSPSGESSTAPGSTSESPSGTAPGTSPSGESSTAPGTSPSGESSTAPGSTSSTAESPGPGTSPSGESSTAPGTSPSGESSTAPGSTSSTAESPGPGTSTPESGSASPGTSTPESGSASPGSTSESPSGTAPGSTSESPSGTAPGTSTPESGSASPGSTSSTAESPGPGTSTPESGSASPGSTSESPSGTAPGTSPSGESSTAPGSTSSTAESPGPGTSPSGESSTAPGTSTPESGSASPGSTSSTAESPGPGSTSSTAESPGPGSTSSTAESPGPGSTSSTAESPGPGTSPSGESSTAPGSTSESPSGTAPGSTSESPSGTAPGTSTPESGPXXXGASASGAPSTXXXXSESPSGTAPGSTSESPSGTAPGSTSESPSGTAPGSTSESPSGTAPGSTSESPSGTAPGSTSESPSGTAPGTSTPESGSASPGTSPSGESSTAPGTSPSGESSTAPGSTSSTAESPGPGTSPSGESSTAPGTSTPESGSASPGSTSESPSGTAPGSTSESPSGTAPGTSPSGESSTAPGSTSESPSGTAPGTSTPESGSASPGTSTPESGSASPGSTSESPSGTAPGTSTPESGSASPGSTSSTAESPGPGSTSESPSGTAPGSTSESPSGTAPGTSPSGESSTAPGSTSSTAESPGPGTSPSGESSTAPGTSTPESGSASPGTSPSGESSTAPGTSPSGESSTAPGTSPSGESSTAPGSTSSTAESPGPGSTSSTAESPGPGTSPSGESSTAPGSSPSASTGTGPGSSTPSGATGSPGSSTPSGATGSPGHGEGTFTSDLSKQMEEEAVRLFIEWLKNGGPSSGAPPPS

SEQ ID NO: 1202 - protein, 904 aa, Artificial Sequence
  Description of Artificial Sequence: Synthetic polypeptide
GASPGTSSTGSPGSSPSASTGTGPGSSPSASTGTGPGTPGSGTASSSPGSSTPSGATGSPGSNPSASTGTGPGASPGTSSTGSPGTPGSGTASSSPGSSTPSGATGSPGTPGSGTASSSPGASPGTSSTGSPGASPGTSSTGSPGTPGSGTASSSPGSSTPSGATGSPGASPGTSSTGSPGTPGSGTASSSPGSSTPSGATGSPGSNPSASTGTGPGSSPSASTGTGPGSSTPSGATGSPGSSTPSGATGSPGASPGTSSTGSPGASPGTSSTGSPGASPGTSSTGSPGTPGSGTASSSPGASPGTSSTGSPGASPGTSSTGSPGASPGTSSTGSPGSSPSASTGTGPGTPGSGTASSSPGASPGTSSTGSPGASPGTSSTGSPGASPGTSSTGSPGSSTPSGATGSPGSSTPSGATGSPGASPGTSSTGSPGTPGSGTASSSPGSSTPSGATGSPGSSTPSGATGSPGSSTPSGATGSPGSSPSASTGTGPGASPGTSSTGSPGASPGTSSTGSPGTPGSGTASSSPGASPGTSSTGSPGASPGTSSTGSPGASPGTSSTGSPGASPGTSSTGSPGTPGSGTASSSPGSSTPSGATGSPGTPGSGTASSSPGSSTPSGATGSPGTPGSGTASSSPGSSTPSGATGSPGSSTPSGATGSPGSSPSASTGTGPGSSPSASTGTGPGASPGTSSTGSPGTPGSGTASSSPGSSTPSGATGSPGSSPSASTGTGPGSSPSASTGTGPGASPGTSSTGSPGASPGTSSTGSPGSSTPSGATGSPGSSPSASTGTGPGASPGTSSTGSPGSSPSASTGTGPGTPGSGTASSSPGSSTPSGATGSPGSSTPSGATGSPGASPGTSSTGSPGHGEGTFTSDLSKQMEEEAVRLFIEWLKNGGPSSGAPPPS

SEQ ID NO: 1203 - protein, 915 aa, Artificial Sequence
  Description of Artificial Sequence: Synthetic polypeptide
GTSTEPSEGSAPGSEPATSGSETPGSPAGSPTSTEEGSTSSTAESPGPGTSTPESGSASPGSTSESPSGTAPGSTSESPSGTAPGTSTPESGSASPGTSTPESGSASPGSEPATSGSETPGTSESATPESGPGSPAGSPTSTEEGTSTEPSEGSAPGTSESATPESGPGTSTEPSEGSAPGTSTEPSEGSAPGSPAGSPTSTEEGTSTEPSEGSAPGTSTEPSEGSAPGTSESATPESGPGTSESATPESGPGTSTEPSEGSAPGTSTEPSEGSAPGTSESATPESGPGTSTEPSEGSAPGSEPATSGSETPGSPAGSPTSTEEGSSTPSGATGSPGTPGSGTASSSPGSSTPSGATGSPGTSTEPSEGSAPGTSTEPSEGSAPGSEPATSGSETPGSPAGSPTSTEEGSPAGSPTSTEEGTSTEPSEGSAPGASASGAPSTGGTSESATPESGPGSPAGSPTSTEEGSPAGSPTSTEEGSTSSTAESPGPGSTSESPSGTAPGTSPSGESSTAPGTPGSGTASSSPGSSTPSGATGSPGSSPSASTGTGPGSEPATSGSETPGTSESATPESGPGSEPATSGSETPGSTSSTAESPGPGSTSSTAESPGPGTSPSGESSTAPGSEPATSGSETPGSEPATSGSETPGTSTEPSEGSAPGSTSSTAESPGPGTSTPESGSASPGSTSESPSGTAPGTSTEPSEGSAPGTSTEPSEGSAPGTSTEPSEGSAPGSSTPSGATGSPGSSPSASTGTGPGASPGTSSTGSPGSEPATSGSETPGTSESATPESGPGSPAGSPTSTEEGSSTPSGATGSPGSSPSASTGTGPGASPGTSSTGSPGTSESATPESGPGTSTEPSEGSAPGTSTEPSEGSAPGHGEGTFTSDLSKQMEEEAVRLFIEWLKNGGPSSGAPPPS

SEQ ID NO: 1204 - protein, 1358 aa, Artificial Sequence
  Description of Artificial Sequence: Synthetic polypeptide
GTSTEPSEGSAPGSEPATSGSETPGSPAGSPTSTEEGSTSSTAESPGPGTSTPESGSASPGSTSESPSGTAPGSTSESPSGTAPGTSTPESGSASPGTSTPESGSASPGSEPATSGSETPGTSESATPESGPGSPAGSPTSTEEGTSTEPSEGSAPGTSESATPESGPGTSTEPSEGSAPGTSTEPSEGSAPGSPAGSPTSTEEGTSTEPSEGSAPGTSTEPSEGSAPGTSESATPESGPGTSESATPESGPGTSTEPSEGSAPGTSTEPSEGSAPGTSESATPESGPGTSTEPSEGSAPGSEPATSGSETPGSPAGSPTSTEEGSSTPSGATGSPGTPGSGTASSSPGSSTPSGATGSPGTSTEPSEGSAPGTSTEPSEGSAPGSEPATSGSETPGSPAGSPTSTEEGSPAGSPTSTEEGTSTEPSEGSAPGPEPTGPAPSGGSEPATSGSETPGTSESATPESGPGSPAGSPTSTEEGTSESATPESGPGSPAGSPTSTEEGSPAGSPTSTEEGTSESATPESGPGSPAGSPTSTEEGSPAGSPTSTEEGSTSSTAESPGPGSTSESPSGTAPGTSPSGESSTAPGSTSESPSGTAPGSTSESPSGTAPGTSPSGESSTAPGTSTEPSEGSAPGTSESATPESGPGTSESATPESGPGSEPATSGSETPGTSESATPESGPGTSESATPESGPGTSTEPSEGSAPGTSESATPESGPGTSTEPSEGSAPGTSPSGESSTAPGTSPSGESSTAPGTSPSGESSTAPGTSTEPSEGSAPGSPAGSPTSTEEGTSTEPSEGSAPGSSPSASTGTGPGSSTPSGATGSPGSSTPSGATGSPGSSTPSGATGSPGSSTPSGATGSPGASPGTSSTGSPGASASGAPSTGGTSPSGESSTAPGSTSSTAESPGPGTSPSGESSTAPGTSESATPESGPGTSTEPSEGSAPGTSTEPSEGSAPGSSPSASTGTGPGSSTPSGATGSPGASPGTSSTGSPGTSTPESGSASPGTSPSGESSTAPGTSPSGESSTAPGTSESATPESGPGSEPATSGSETPGTSTEPSEGSAPGSTSESPSGTAPGSTSESPSGTAPGTSTPESGSASPGSPAGSPTSTEEGTSESATPESGPGTSTEPSEGSAPGSPAGSPTSTEEGTSESATPESGPGSEPATSGSETPGSSTPSGATGSPGASPGTSSTGSPGSSTPSGATGSPGSTSESPSGTAPGTSPSGESSTAPGSTSSTAESPGPGSSTPSGATGSPGASPGTSSTGSPGTPGSGTASSSPGSPAGSPTSTEEGSPAGSPTSTEEGTSTEPSEGSAPGHGEGTFTSDLSKQMEEEAVRLFIEWLKNGGPSSGAPPPS

SEQ ID NO: 1205 - protein, 167 aa, Artificial Sequence
  Description of Artificial Sequence: Synthetic polypeptide
DPSKKQGPWLEEEEEAYGWMDFGGSEPATSGSETPGTSESATPESGPGSEPATSGSETPGSPAGSPTSTEEGTSTEPSEGSAPGSEPATSGSETPGSEPATSGSETPGSEPATSGSETPGTSTEPSEGSAPGTSESATPESGPGSEPATSGSETPGTSTEPSEGSAP

SEQ ID NO: 1206 - protein, 167 aa, Artificial Sequence
  Description of Artificial Sequence: Synthetic polypeptide
DPSKKQGPWLEEEEEAYGWMDFGGTSTPESGSASPGTSPSGESSTAPGTSPSGESSTAPGSTSSTAESPGPGSTSESPSGTAPGSTSSTAESPGPGTSPSGESSTAPGTSTPESGSASPGSTSSTAESPGPGTSPSGESSTAPGTSPSGESSTAPGTSPSGESSTAP

SEQ ID NO: 1207 - protein, 311 aa, Artificial Sequence
  Description of Artificial Sequence: Synthetic polypeptide
DPSKKQGPWLEEEEEAYGWMDFGGTSESATPESGPGSEPATSGSETPGTSESATPESGPGSEPATSGSETPGTSESATPESGPGTSTEPSEGSAPGSPAGSPTSTEEGTSESATPESGPGSEPATSGSETPGTSESATPESGPGSPAGSPTSTEEGSPAGSPTSTEEGTSTEPSEGSAPGTSESATPESGPGTSESATPESGPGTSESATPESGPGSEPATSGSETPGSEPATSGSETPGSPAGSPTSTEEGTSTEPSEGSAPGTSTEPSEGSAPGSEPATSGSETPGTSESATPESGPGTSTEPSEGSAP

SEQ ID NO: 1208 - protein, 599 aa, Artificial Sequence
  Description of Artificial Sequence: Synthetic polypeptide
DPSKKQGPWLEEEEEAYGWMDFGGSPAGSPTSTEEGTSESATPESGPGTSTEPSEGSAPGSPAGSPTSTEEGTSTEPSEGSAPGTSTEPSEGSAPGTSESATPESGPGSEPATSGSETPGSEPATSGSETPGSPAGSPTSTEEGTSESATPESGPGTSTEPSEGSAPGTSTEPSEGSAPGSPAGSPTSTEEGTSTEPSEGSAPGTSTEPSEGSAPGTSESATPESGPGTSTEPSEGSAPGTSESATPESGPGSEPATSGSETPGTSTEPSEGSAPGTSTEPSEGSAPGTSESATPESGPGTSESATPESGPGSPAGSPTSTEEGTSESATPESGPGSEPATSGSETPGTSESATPESGPGTSTEPSEGSAPGTSTEPSEGSAPGTSTEPSEGSAPGTSTEPSEGSAPGTSTEPSEGSAPGTSTEPSEGSAPGSPAGSPTSTEEGTSTEPSEGSAPGTSESATPESGPGSEPATSGSETPGTSESATPESGPGSEPATSGSETPGTSESATPESGPGTSTEPSEGSAPGTSESATPESGPGSPAGSPTSTEEGSPAGSPTSTEEGSPAGSPTSTEEGTSESATPESGPGTSTEPSEGSAP

SEQ ID NO: 1209 - protein, 599 aa, Artificial Sequence
  Description of Artificial Sequence: Synthetic polypeptide
DPSKKQGPWLEEEEEAYGWMDFGGSTSSTAESPGPGSTSSTAESPGPGSTSESPSGTAPGSTSSTAESPGPGSTSSTAESPGPGTSTPESGSASPGSTSESPSGTAPGTSPSGESSTAPGSTSESPSGTAPGSTSESPSGTAPGTSPSGESSTAPGSTSESPSGTAPGSTSESPSGTAPGTSPSGESSTAPGSTSESPSGTAPGSTSESPSGTAPGSTSESPSGTAPGTSTPESGSASPGSTSESPSGTAPGTSTPESGSASPGSTSSTAESPGPGSTSSTAESPGPGTSTPESGSASPGTSTPESGSASPGSTSESPSGTAPGTSTPESGSASPGTSTPESGSASPGSTSESPSGTAPGSTSESPSGTAPGSTSESPSGTAPGSTSSTAESPGPGTSTPESGSASPGTSTPESGSASPGSTSESPSGTAPGSTSESPSGTAPGTSTPESGSASPGSTSESPSGTAPGSTSESPSGTAPGTSTPESGSASPGTSPSGESSTAPGSTSSTAESPGPGTSPSGESSTAPGSTSSTAESPGPGTSTPESGSASPGSTSESPSGTAPGSTSSTAESPGPGTSTPESGSASPGTSTPESGSASP

SEQ ID NO: 1210 - protein, 859 aa, Artificial Sequence
  Description of Artificial Sequence: Synthetic polypeptide
DPSKKQGPWLEEEEEAYGWMDFGGSSESGSSEGGPGSSESGSSEGGPGESPGGSSGSESGSGGEPSESGSSGESPGGSSGSESGESPGGSSGSESGSSESGSSEGGPGSSESGSSEGGPGSSESGSSEGGPGESPGGSSGSESGESPGGSSGSESGESPGGSSGSESGSSESGSSEGGPGSSESGSSEGGPGSSESGSSEGGPGSSESGSSEGGPGSSESGSSEGGPGSSESGSSEGGPGSGGEPSESGSSGESPGGSSGSESGESPGGSSGSESGSGGEPSESGSSGSEGSSGPGESSGSSESGSSEGGPGSGGEPSESGSSGSEGSSGPGESSGSSESGSSEGGPGSGGEPSESGSSGESPGGSSGSESGSGGEPSESGSSGSGGEPSESGSSGSSESGSSEGGPGSGGEPSESGSSGSGGEPSESGSSGSEGSSGPGESSGESPGGSSGSESGSEGSSGPGESSGSEGSSGPGESSGSGGEPSESGSSGSSESGSSEGGPGSSESGSSEGGPGESPGGSSGSESGSGGEPSESGSSGSEGSSGPGESSGESPGGSSGSESGSEGSSGPGSSESGSSEGGPGSGGEPSESGSSGSEGSSGPGESSGSEGSSGPGESSGSEGSSGPGESSGSGGEPSESGSSGSGGEPSESGSSGESPGGSSGSESGESPGGSSGSESGSGGEPSESGSSGSEGSSGPGESSGESPGGSSGSESGSSESGSSEGGPGSSESGSSEGGPGSSESGSSEGGPGSGGEPSESGSSGSSESGSSEGGPGESPGGSSGSESGSGGEPSESGSSGSSESGSSEGGPGESPGGSSGSESGSGGEPSESGSSGESPGGSSGSESGSGGEPSESGSS

SEQ ID NO: 1211 - protein, 887 aa, Artificial Sequence
  Description of Artificial Sequence: Synthetic polypeptide
DPSKKQGPWLEEEEEAYGWMDFGGSPAGSPTSTEEGTSESATPESGPGTSTEPSEGSAPGSPAGSPTSTEEGTSTEPSEGSAPGTSTEPSEGSAPGTSESATPESGPGSEPATSGSETPGSEPATSGSETPGSPAGSPTSTEEGTSESATPESGPGTSTEPSEGSAPGTSTEPSEGSAPGSPAGSPTSTEEGTSTEPSEGSAPGTSTEPSEGSAPGTSESATPESGPGTSTEPSEGSAPGTSESATPESGPGSEPATSGSETPGTSTEPSEGSAPGTSTEPSEGSAPGTSESATPESGPGTSESATPESGPGSPAGSPTSTEEGTSESATPESGPGSEPATSGSETPGTSESATPESGPGTSTEPSEGSAPGTSTEPSEGSAPGTSTEPSEGSAPGTSTEPSEGSAPGTSTEPSEGSAPGTSTEPSEGSAPGSPAGSPTSTEEGTSTEPSEGSAPGTSESATPESGPGSEPATSGSETPGTSESATPESGPGSEPATSGSETPGTSESATPESGPGTSTEPSEGSAPGTSESATPESGPGSPAGSPTSTEEGSPAGSPTSTEEGSPAGSPTSTEEGTSESATPESGPGTSTEPSEGSAPGTSESATPESGPGSEPATSGSETPGTSESATPESGPGSEPATSGSETPGTSESATPESGPGTSTEPSEGSAPGSPAGSPTSTEEGTSESATPESGPGSEPATSGSETPGTSESATPESGPGSPAGSPTSTEEGSPAGSPTSTEEGTSTEPSEGSAPGTSESATPESGPGTSESATPESGPGTSESATPESGPGSEPATSGSETPGSEPATSGSETPGSPAGSPTSTEEGTSTEPSEGSAPGTSTEPSEGSAPGSEPATSGSETPGTSESATPESGPGTSTEPSEGSAP

SEQ ID NO: 1212 - protein, 898 aa, Artificial Sequence
  Description of Artificial Sequence: Synthetic polypeptide
  MOD_RES (453)..(455): Any amino acid
  MOD_RES (466)..(469): Any amino acid
DPSKKQGPWLEEEEEAYGWMDFGGSTSESPSGTAPGTSPSGESSTAPGSTSESPSGTAPGSTSESPSGTAPGTSTPESGSASPGTSTPESGSASPGSTSESPSGTAPGSTSESPSGTAPGTSPSGESSTAPGSTSESPSGTAPGTSPSGESSTAPGTSPSGESSTAPGSTSSTAESPGPGTSPSGESSTAPGTSPSGESSTAPGSTSSTAESPGPGTSTPESGSASPGTSTPESGSASPGSTSESPSGTAPGSTSESPSGTAPGTSTPESGSASPGSTSSTAESPGPGTSTPESGSASPGSTSESPSGTAPGTSPSGESSTAPGSTSSTAESPGPGTSPSGESSTAPGTSTPESGSASPGSTSSTAESPGPGSTSSTAESPGPGSTSSTAESPGPGSTSSTAESPGPGTSPSGESSTAPGSTSESPSGTAPGSTSESPSGTAPGTSTPESGPXXXGASASGAPSTXXXXSESPSGTAPGSTSESPSGTAPGSTSESPSGTAPGSTSESPSGTAPGSTSESPSGTAPGSTSESPSGTAPGTSTPESGSASPGTSPSGESSTAPGTSPSGESSTAPGSTSSTAESPGPGTSPSGESSTAPGTSTPESGSASPGSTSESPSGTAPGSTSESPSGTAPGTSPSGESSTAPGSTSESPSGTAPGTSTPESGSASPGTSTPESGSASPGSTSESPSGTAPGTSTPESGSASPGSTSSTAESPGPGSTSESPSGTAPGSTSESPSGTAPGTSPSGESSTAPGSTSSTAESPGPGTSPSGESSTAPGTSTPESGSASPGTSPSGESSTAPGTSPSGESSTAPGTSPSGESSTAPGSTSSTAESPGPGSTSSTAESPGPGTSPSGESSTAPGSSPSASTGTGPGSSTPSGATGSPGSSTPSGATGSP

SEQ ID NO: 1213 - protein, 887 aa, Artificial Sequence
  Description of Artificial Sequence: Synthetic polypeptide
DPSKKQGPWLEEEEEAYGWMDFGGASPGTSSTGSPGSSPSASTGTGPGSSPSASTGTGPGTPGSGTASSSPGSSTPSGATGSPGSNPSASTGTGPGASPGTSSTGSPGTPGSGTASSSPGSSTPSGATGSPGTPGSGTASSSPGASPGTSSTGSPGASPGTSSTGSPGTPGSGTASSSPGSSTPSGATGSPGASPGTSSTGSPGTPGSGTASSSPGSSTPSGATGSPGSNPSASTGTGPGSSPSASTGTGPGSSTPSGATGSPGSSTPSGATGSPGASPGTSSTGSPGASPGTSSTGSPGASPGTSSTGSPGTPGSGTASSSPGASPGTSSTGSPGASPGTSSTGSPGASPGTSSTGSPGSSPSASTGTGPGTPGSGTASSSPGASPGTSSTGSPGASPGTSSTGSPGASPGTSSTGSPGSSTPSGATGSPGSSTPSGATGSPGASPGTSSTGSPGTPGSGTASSSPGSSTPSGATGSPGSSTPSGATGSPGSSTPSGATGSPGSSPSASTGTGPGASPGTSSTGSPGASPGTSSTGSPGTPGSGTASSSPGASPGTSSTGSPGASPGTSSTGSPGASPGTSSTGSPGASPGTSSTGSPGTPGSGTASSSPGSSTPSGATGSPGTPGSGTASSSPGSSTPSGATGSPGTPGSGTASSSPGSSTPSGATGSPGSSTPSGATGSPGSSPSASTGTGPGSSPSASTGTGPGASPGTSSTGSPGTPGSGTASSSPGSSTPSGATGSPGSSPSASTGTGPGSSPSASTGTGPGASPGTSSTGSPGASPGTSSTGSPGSSTPSGATGSPGSSPSASTGTGPGASPGTSSTGSPGSSPSASTGTGPGTPGSGTASSSPGSSTPSGATGSPGSSTPSGATGSPGASPGTSSTGSP

SEQ ID NO: 1214 - protein, 898 aa, Artificial Sequence
  Description of Artificial Sequence: Synthetic polypeptide
DPSKKQGPWLEEEEEAYGWMDFGGTSTEPSEGSAPGSEPATSGSETPGSPAGSPTSTEEGSTSSTAESPGPGTSTPESGSASPGSTSESPSGTAPGSTSESPSGTAPGTSTPESGSASPGTSTPESGSASPGSEPATSGSETPGTSESATPESGPGSPAGSPTSTEEGTSTEPSEGSAPGTSESATPESGPGTSTEPSEGSAPGTSTEPSEGSAPGSPAGSPTSTEEGTSTEPSEGSAPGTSTEPSEGSAPGTSESATPESGPGTSESATPESGPGTSTEPSEGSAPGTSTEPSEGSAPGTSESATPESGPGTSTEPSEGSAPGSEPATSGSETPGSPAGSPTSTEEGSSTPSGATGSPGTPGSGTASSSPGSSTPSGATGSPGTSTEPSEGSAPGTSTEPSEGSAPGSEPATSGSETPGSPAGSPTSTEEGSPAGSPTSTEEGTSTEPSEGSAPGASASGAPSTGGTSESATPESGPGSPAGSPTSTEEGSPAGSPTSTEEGSTSSTAESPGPGSTSESPSGTAPGTSPSGESSTAPGTPGSGTASSSPGSSTPSGATGSPGSSPSASTGTGPGSEPATSGSETPGTSESATPESGPGSEPATSGSETPGSTSSTAESPGPGSTSSTAESPGPGTSPSGESSTAPGSEPATSGSETPGSEPATSGSETPGTSTEPSEGSAPGSTSSTAESPGPGTSTPESGSASPGSTSESPSGTAPGTSTEPSEGSAPGTSTEPSEGSAPGTSTEPSEGSAPGSSTPSGATGSPGSSPSASTGTGPGASPGTSSTGSPGSEPATSGSETPGTSESATPESGPGSPAGSPTSTEEGSSTPSGATGSPGSSPSASTGTGPGASPGTSSTGSPGTSESATPESGPGTSTEPSEGSAPGTSTEPSEGSAP

SEQ ID NO: 1215 - protein, 1341 aa, Artificial Sequence
  Description of Artificial Sequence: Synthetic polypeptide
DPSKKQGPWLEEEEEAYGWMDFGGTSTEPSEGSAPGSEPATSGSETPGSPAGSPTSTEEGSTSSTAESPGPGTSTPESGSASPGSTSESPSGTAPGSTSESPSGTAPGTSTPESGSASPGTSTPESGSASPGSEPATSGSETPGTSESATPESGPGSPAGSPTSTEEGTSTEPSEGSAPGTSESATPESGPGTSTEPSEGSAPGTSTEPSEGSAPGSPAGSPTSTEEGTSTEPSEGSAPGTSTEPSEGSAPGTSESATPESGPGTSESATPESGPGTSTEPSEGSAPGTSTEPSEGSAPGTSESATPESGPGTSTEPSEGSAPGSEPATSGSETPGSPAGSPTSTEEGSSTPSGATGSPGTPGSGTASSSPGSSTPSGATGSPGTSTEPSEGSAPGTSTEPSEGSAPGSEPATSGSETPGSPAGSPTSTEEGSPAGSPTSTEEGTSTEPSEGSAPGPEPTGPAPSGGSEPATSGSETPGTSESATPESGPGSPAGSPTSTEEGTSESATPESGPGSPAGSPTSTEEGSPAGSPTSTEEGTSESATPESGPGSPAGSPTSTEEGSPAGSPTSTEEGSTSSTAESPGPGSTSESPSGTAPGTSPSGESSTAPGSTSESPSGTAPGSTSESPSGTAPGTSPSGESSTAPGTSTEPSEGSAPGTSESATPESGPGTSESATPESGPGSEPATSGSETPGTSESATPESGPGTSESATPESGPGTSTEPSEGSAPGTSESATPESGPGTSTEPSEGSAPGTSPSGESSTAPGTSPSGESSTAPGTSPSGESSTAPGTSTEPSEGSAPGSPAGSPTSTEEGTSTEPSEGSAPGSSPSASTGTGPGSSTPSGATGSPGSSTPSGATGSPGSSTPSGATGSPGSSTPSGATGSPGASPGTSSTGSPGASASGAPSTGGTSPSGESSTAPGSTSSTAESPGPGTSPSGESSTAPGTSESATPESGPGTSTEPSEGSAPGTSTEPSEGSAPGSSPSASTGTGPGSSTPSGATGSPGASPGTSSTGSPGTSTPESGSASPGTSPSGESSTAPGTSPSGESSTAPGTSESATPESGPGSEPATSGSETPGTSTEPSEGSAPGSTSESPSGTAPGSTSESPSGTAPGTSTPESGSASPGSPAGSPTSTEEGTSESATPESGPGTSTEPSEGSAPGSPAGSPTSTEEGTSESATPESGPGSEPATSGSETPGSSTPSGATGSPGASPGTSSTGSPGSSTPSGATGSPGSTSESPSGTAPGTSPSGESSTAPGSTSSTAESPGPGSSTPSGATGSPGASPGTSSTGSPGTPGSGTASSSPGSPAGSPTSTEEGSPAGSPTSTEEGTSTEPSEGSAP

SEQ ID NO: 1216 - protein, 936 aa, Artificial Sequence
  Description of Artificial Sequence: Synthetic polypeptide
MAEPAGSPTSTEEGTPGSGTASSSPGSSTPSGATGSPGASPGTSSTGSPGSPAGSPTSTEEGTSESATPESGPGTSTEPSEGSAPGSPAGSPTSTEEGTSTEPSEGSAPGTSTEPSEGSAPGTSESATPESGPGSEPATSGSETPGSEPATSGSETPGSPAGSPTSTEEGTSESATPESGPGTSTEPSEGSAPGTSTEPSEGSAPGSPAGSPTSTEEGTSTEPSEGSAPGTSTEPSEGSAPGTSESATPESGPGTSTEPSEGSAPGTSESATPESGPGSEPATSGSETPGTSTEPSEGSAPGTSTEPSEGSAPGTSESATPESGPGTSESATPESGPGSPAGSPTSTEEGTSESATPESGPGSEPATSGSETPGTSESATPESGPGTSTEPSEGSAPGTSTEPSEGSAPGTSTEPSEGSAPGTSTEPSEGSAPGTSTEPSEGSAPGTSTEPSEGSAPGSPAGSPTSTEEGTSTEPSEGSAPGTSESATPESGPGSEPATSGSETPGTSESATPESGPGSEPATSGSETPGTSESATPESGPGTSTEPSEGSAPGTSESATPESGPGSPAGSPTSTEEGSPAGSPTSTEEGSPAGSPTSTEEGTSESATPESGPGTSTEPSEGSAPGTSESATPESGPGSEPATSGSETPGTSESATPESGPGSEPATSGSETPGTSESATPESGPGTSTEPSEGSAPGSPAGSPTSTEEGTSESATPESGPGSEPATSGSETPGTSESATPESGPGSPAGSPTSTEEGSPAGSPTSTEEGTSTEPSEGSAPGTSESATPESGPGTSESATPESGPGTSESATPESGPGSEPATSGSETPGSEPATSGSETPGSPAGSPTSTEEGTSTEPSEGSAPGTSTEPSEGSAPGSEPATSGSETPGTSESATPESGPGTSTEPSEGSAPGDPSKKQGPWLEEEEEAYGWMDF

SEQ ID NO: 1217 - protein, 947 aa, Artificial Sequence
  Description of Artificial Sequence: Synthetic polypeptide
MAEPAGSPTSTEEGASPGTSSTGSPGSSTPSGATGSPGSSTPSGATGSPGTSTEPSEGSAPGSEPATSGSETPGSPAGSPTSTEEGSTSSTAESPGPGTSTPESGSASPGSTSESPSGTAPGSTSESPSGTAPGTSTPESGSASPGTSTPESGSASPGSEPATSGSETPGTSESATPESGPGSPAGSPTSTEEGTSTEPSEGSAPGTSESATPESGPGTSTEPSEGSAPGTSTEPSEGSAPGSPAGSPTSTEEGTSTEPSEGSAPGTSTEPSEGSAPGTSESATPESGPGTSESATPESGPGTSTEPSEGSAPGTSTEPSEGSAPGTSESATPESGPGTSTEPSEGSAPGSEPATSGSETPGSPAGSPTSTEEGSSTPSGATGSPGTPGSGTASSSPGSSTPSGATGSPGTSTEPSEGSAPGTSTEPSEGSAPGSEPATSGSETPGSPAGSPTSTEEGSPAGSPTSTEEGTSTEPSEGSAPGASASGAPSTGGTSESATPESGPGSPAGSPTSTEEGSPAGSPTSTEEGSTSSTAESPGPGSTSESPSGTAPGTSPSGESSTAPGTPGSGTASSSPGSSTPSGATGSPGSSPSASTGTGPGSEPATSGSETPGTSESATPESGPGSEPATSGSETPGSTSSTAESPGPGSTSSTAESPGPGTSPSGESSTAPGSEPATSGSETPGSEPATSGSETPGTSTEPSEGSAPGSTSSTAESPGPGTSTPESGSASPGSTSESPSGTAPGTSTEPSEGSAPGTSTEPSEGSAPGTSTEPSEGSAPGSSTPSGATGSPGSSPSASTGTGPGASPGTSSTGSPGSEPATSGSETPGTSESATPESGPGSPAGSPTSTEEGSSTPSGATGSPGSSPSASTGTGPGASPGTSSTGSPGTSESATPESGPGTSTEPSEGSAPGTSTEPSEGSAPGDPSKKQGPWLEEEEEAYGWMDF

SEQ ID NO: 1218 - protein, 167 aa, Artificial Sequence
  Description of Artificial Sequence: Synthetic polypeptide
GSEPATSGSETPGTSESATPESGPGSEPATSGSETPGSPAGSPTSTEEGTSTEPSEGSAPGSEPATSGSETPGSEPATSGSETPGSEPATSGSETPGTSTEPSEGSAPGTSESATPESGPGSEPATSGSETPGTSTEPSEGSAPGDPSKKQGPWLEEEEEAYGWMDF

SEQ ID NO: 1219 - protein, 167 aa, Artificial Sequence
  Description of Artificial Sequence: Synthetic polypeptide
GTSTPESGSASPGTSPSGESSTAPGTSPSGESSTAPGSTSSTAESPGPGSTSESPSGTAPGSTSSTAESPGPGTSPSGESSTAPGTSTPESGSASPGSTSSTAESPGPGTSPSGESSTAPGTSPSGESSTAPGTSPSGESSTAPGDPSKKQGPWLEEEEEAYGWMDF

SEQ ID NO: 1220 - protein, 311 aa, Artificial Sequence
  Description of Artificial Sequence: Synthetic polypeptide
GTSESATPESGPGSEPATSGSETPGTSESATPESGPGSEPATSGSETPGTSESATPESGPGTSTEPSEGSAPGSPAGSPTSTEEGTSESATPESGPGSEPATSGSETPGTSESATPESGPGSPAGSPTSTEEGSPAGSPTSTEEGTSTEPSEGSAPGTSESATPESGPGTSESATPESGPGTSESATPESGPGSEPATSGSETPGSEPATSGSETPGSPAGSPTSTEEGTSTEPSEGSAPGTSTEPSEGSAPGSEPATSGSETPGTSESATPESGPGTSTEPSEGSAPGDPSKKQGPWLEEEEEAYGWMDF

SEQ ID NO: 1221 - protein, 599 aa, Artificial Sequence
  Description of Artificial Sequence: Synthetic polypeptide
GSPAGSPTSTEEGTSESATPESGPGTSTEPSEGSAPGSPAGSPTSTEEGTSTEPSEGSAPGTSTEPSEGSAPGTSESATPESGPGSEPATSGSETPGSEPATSGSETPGSPAGSPTSTEEGTSESATPESGPGTSTEPSEGSAPGTSTEPSEGSAPGSPAGSPTSTEEGTSTEPSEGSAPGTSTEPSEGSAPGTSESATPESGPGTSTEPSEGSAPGTSESATPESGPGSEPATSGSETPGTSTEPSEGSAPGTSTEPSEGSAPGTSESATPESGPGTSESATPESGPGSPAGSPTSTEEGTSESATPESGPGSEPATSGSETPGTSESATPESGPGTSTEPSEGSAPGTSTEPSEGSAPGTSTEPSEGSAPGTSTEPSEGSAPGTSTEPSEGSAPGTSTEPSEGSAPGSPAGSPTSTEEGTSTEPSEGSAPGTSESATPESGPGSEPATSGSETPGTSESATPESGPGSEPATSGSETPGTSESATPESGPGTSTEPSEGSAPGTSESATPESGPGSPAGSPTSTEEGSPAGSPTSTEEGSPAGSPTSTEEGTSESATPESGPGTSTEPSEGSAPGDPSKKQGPWLEEEEEAYGWMDF

SEQ ID NO: 1222 - protein, 599 aa, Artificial Sequence
  Description of Artificial Sequence: Synthetic polypeptide
GSTSSTAESPGPGSTSSTAESPGPGSTSESPSGTAPGSTSSTAESPGPGSTSSTAESPGPGTSTPESGSASPGSTSESPSGTAPGTSPSGESSTAPGSTSESPSGTAPGSTSESPSGTAPGTSPSGESSTAPGSTSESPSGTAPGSTSESPSGTAPGTSPSGESSTAPGSTSESPSGTAPGSTSESPSGTAPGSTSESPSGTAPGTSTPESGSASPGSTSESPSGTAPGTSTPESGSASPGSTSSTAESPGPGSTSSTAESPGPGTSTPESGSASPGTSTPESGSASPGSTSESPSGTAPGTSTPESGSASPGTSTPESGSASPGSTSESPSGTAPGSTSESPSGTAPGSTSESPSGTAPGSTSSTAESPGPGTSTPESGSASPGTSTPESGSASPGSTSESPSGTAPGSTSESPSGTAPGTSTPESGSASPGSTSESPSGTAPGSTSESPSGTAPGTSTPESGSASPGTSPSGESSTAPGSTSSTAESPGPGTSPSGESSTAPGSTSSTAESPGPGTSTPESGSASPGSTSESPSGTAPGSTSSTAESPGPGTSTPESGSASPGTSTPESGSASPGDPSKKQGPWLEEEEEAYGWMDF

SEQ ID NO: 1223 - protein, 859 aa, Artificial Sequence
  Description of Artificial Sequence: Synthetic polypeptide
GSSESGSSEGGPGSSESGSSEGGPGESPGGSSGSESGSGGEPSESGSSGESPGGSSGSESGESPGGSSGSESGSSESGSSEGGPGSSESGSSEGGPGSSESGSSEGGPGESPGGSSGSESGESPGGSSGSESGESPGGSSGSESGSSESGSSEGGPGSSESGSSEGGPGSSESGSSEGGPGSSESGSSEGGPGSSESGSSEGGPGSSESGSSEGGPGSGGEPSESGSSGESPGGSSGSESGESPGGSSGSESGSGGEPSESGSSGSEGSSGPGESSGSSESGSSEGGPGSGGEPSESGSSGSEGSSGPGESSGSSESGSSEGGPGSGGEPSESGSSGESPGGSSGSESGSGGEPSESGSSGSGGEPSESGSSGSSESGSSEGGPGSGGEPSESGSSGSGGEPSESGSSGSEGSSGPGESSGESPGGSSGSESGSEGSSGPGESSGSEGSSGPGESSGSGGEPSESGSSGSSESGSSEGGPGSSESGSSEGGPGESPGGSSGSESGSGGEPSESGSSGSEGSSGPGESSGESPGGSSGSESGSEGSSGPGSSESGSSEGGPGSGGEPSESGSSGSEGSSGPGESSGSEGSSGPGESSGSEGSSGPGESSGSGGEPSESGSSGSGGEPSESGSSGESPGGSSGSESGESPGGSSGSESGSGGEPSESGSSGSEGSSGPGESSGESPGGSSGSESGSSESGSSEGGPGSSESGSSEGGPGSSESGSSEGGPGSGGEPSESGSSGSSESGSSEGGPGESPGGSSGSESGSGGEPSESGSSGSSESGSSEGGPGESPGGSSGSESGSGGEPSESGSSGESPGGSSGSESGSGGEPSESGSSGDPSKKQGPWLEEEEEAYGWMDF

SEQ ID NO: 1224 - protein, 887 aa, Artificial Sequence
  Description of Artificial Sequence: Synthetic polypeptide
GSPAGSPTSTEEGTSESATPESGPGTSTEPSEGSAPGSPAGSPTSTEEGTSTEPSEGSAPGTSTEPSEGSAPGTSESATPESGPGSEPATSGSETPGSEPATSGSETPGSPAGSPTSTEEGTSESATPESGPGTSTEPSEGSAPGTSTEPSEGSAPGSPAGSPTSTEEGTSTEPSEGSAPGTSTEPSEGSAPGTSESATPESGPGTSTEPSEGSAPGTSESATPESGPGSEPATSGSETPGTSTEPSEGSAPGTSTEPSEGSAPGTSESATPESGPGTSESATPESGPGSPAGSPTSTEEGTSESATPESGPGSEPATSGSETPGTSESATPESGPGTSTEPSEGSAPGTSTEPSEGSAPGTSTEPSEGSAPGTSTEPSEGSAPGTSTEPSEGSAPGTSTEPSEGSAPGSPAGSPTSTEEGTSTEPSEGSAPGTSESATPESGPGSEPATSGSETPGTSESATPESGPGSEPATSGSETPGTSESATPESGPGTSTEPSEGSAPGTSESATPESGPGSPAGSPTSTEEGSPAGSPTSTEEGSPAGSPTSTEEGTSESATPESGPGTSTEPSEGSAPGTSESATPESGPGSEPATSGSETPGTSESATPESGPGSEPATSGSETPGTSESATPESGPGTSTEPSEGSAPGSPAGSPTSTEEGTSESATPESGPGSEPATSGSETPGTSESATPESGPGSPAGSPTSTEEGSPAGSPTSTEEGTSTEPSEGSAPGTSESATPESGPGTSESATPESGPGTSESATPESGPGSEPATSGSETPGSEPATSGSETPGSPAGSPTSTEEGTSTEPSEGSAPGTSTEPSEGSAPGSEPATSGSETPGTSESATPESGPGTSTEPSEGSAPGDPSKKQGPWLEEEEEAYGWMDF

SEQ ID NO: 1225 - protein, 898 aa, Artificial Sequence
  Description of Artificial Sequence: Synthetic polypeptide
  MOD_RES (430)..(432): Any amino acid
  MOD_RES (443)..(446): Any amino acid
GSTSESPSGTAPGTSPSGESSTAPGSTSESPSGTAPGSTSESPSGTAPGTSTPESGSASPGTSTPESGSASPGSTSESPSGTAPGSTSESPSGTAPGTSPSGESSTAPGSTSESPSGTAPGTSPSGESSTAPGTSPSGESSTAPGSTSSTAESPGPGTSPSGESSTAPGTSPSGESSTAPGSTSSTAESPGPGTSTPESGSASPGTSTPESGSASPGSTSESPSGTAPGSTSESPSGTAPGTSTPESGSASPGSTSSTAESPGPGTSTPESGSASPGSTSESPSGTAPGTSPSGESSTAPGSTSSTAESPGPGTSPSGESSTAPGTSTPESGSASPGSTSSTAESPGPGSTSSTAESPGPGSTSSTAESPGPGSTSSTAESPGPGTSPSGESSTAPGSTSESPSGTAPGSTSESPSGTAPGTSTPESGPXXXGASASGAPSTXXXXSESPSGTAPGSTSESPSGTAPGSTSESPSGTAPGSTSESPSGTAPGSTSESPSGTAPGSTSESPSGTAPGTSTPESGSASPGTSPSGESSTAPGTSPSGESSTAPGSTSSTAESPGPGTSPSGESSTAPGTSTPESGSASPGSTSESPSGTAPGSTSESPSGTAPGTSPSGESSTAPGSTSESPSGTAPGTSTPESGSASPGTSTPESGSASPGSTSESPSGTAPGTSTPESGSASPGSTSSTAESPGPGSTSESPSGTAPGSTSESPSGTAPGTSPSGESSTAPGSTSSTAESPGPGTSPSGESSTAPGTSTPESGSASPGTSPSGESSTAPGTSPSGESSTAPGTSPSGESSTAPGSTSSTAESPGPGSTSSTAESPGPGTSPSGESSTAPGSSPSASTGTGPGSSTPSGATGSPGSSTPSGATGSPGDPSKKQGPWLEEEEEAYGWMDF

SEQ ID NO: 1226 - protein, 887 aa, Artificial Sequence
  Description of Artificial Sequence: Synthetic polypeptide
GASPGTSSTGSPGSSPSASTGTGPGSSPSASTGTGPGTPGSGTASSSPGSSTPSGATGSPGSNPSASTGTGPGASPGTSSTGSPGTPGSGTASSSPGSSTPSGATGSPGTPGSGTASSSPGASPGTSSTGSPGASPGTSSTGSPGTPGSGTASSSPGSSTPSGATGSPGASPGTSSTGSPGTPGSGTASSSPGSSTPSGATGSPGSNPSASTGTGPGSSPSASTGTGPGSSTPSGATGSPGSSTPSGATGSPGASPGTSSTGSPGASPGTSSTGSPGASPGTSSTGSPGTPGSGTASSSPGASPGTSSTGSPGASPGTSSTGSPGASPGTSSTGSPGSSPSASTGTGPGTPGSGTASSSPGASPGTSSTGSPGASPGTSSTGSPGASPGTSSTGSPGSSTPSGATGSPGSSTPSGATGSPGASPGTSSTGSPGTPGSGTASSSPGSSTPSGATGSPGSSTPSGATGSPGSSTPSGATGSPGSSPSASTGTGPGASPGTSSTGSPGASPGTSSTGSPGTPGSGTASSSPGASPGTSSTGSPGASPGTSSTGSPGASPGTSSTGSPGASPGTSSTGSPGTPGSGTASSSPGSSTPSGATGSPGTPGSGTASSSPGSSTPSGATGSPGTPGSGTASSSPGSSTPSGATGSPGSSTPSGATGSPGSSPSASTGTGPGSSPSASTGTGPGASPGTSSTGSPGTPGSGTASSSPGSSTPSGATGSPGSSPSASTGTGPGSSPSASTGTGPGASPGTSSTGSPGASPGTSSTGSPGSSTPSGATGSPGSSPSASTGTGPGASPGTSSTGSPGSSPSASTGTGPGTPGSGTASSSPGSSTPSGATGSPGSSTPSGATGSPGASPGTSSTGSPGDPSKKQGPWLEEEEEAYGWMDF

SEQ ID NO: 1227 - protein, 898 aa, Artificial Sequence
  Description of Artificial Sequence: Synthetic polypeptide
GTSTEPSEGSAPGSEPATSGSETPGSPAGSPTSTEEGSTSSTAESPGPGTSTPESGSASPGSTSESPSGTAPGSTSESPSGTAPGTSTPESGSASPGTSTPESGSASPGSEPATSGSETPGTSESATPESGPGSPAGSPTSTEEGTSTEPSEGSAPGTSESATPESGPGTSTEPSEGSAPGTSTEPSEGSAPGSPAGSPTSTEEGTSTEPSEGSAPGTSTEPSEGSAPGTSESATPESGPGTSESATPESGPGTSTEPSEGSAPGTSTEPSEGSAPGTSESATPESGPGTSTEPSEGSAPGSEPATSGSETPGSPAGSPTSTEEGSSTPSGATGSPGTPGSGTASSSPGSSTPSGATGSPGTSTEPSEGSAPGTSTEPSEGSAPGSEPATSGSETPGSPAGSPTSTEEGSPAGSPTSTEEGTSTEPSEGSAPGASASGAPSTGGTSESATPESGPGSPAGSPTSTEEGSPAGSPTSTEEGSTSSTAESPGPGSTSESPSGTAPGTSPSGESSTAPGTPGSGTASSSPGSSTPSGATGSPGSSPSASTGTGPGSEPATSGSETPGTSESATPESGPGSEPATSGSETPGSTSSTAESPGPGSTSSTAESPGPGTSPSGESSTAPGSEPATSGSETPGSEPATSGSETPGTSTEPSEGSAPGSTSSTAESPGPGTSTPESGSASPGSTSESPSGTAPGTSTEPSEGSAPGTSTEPSEGSAPGTSTEPSEGSAPGSSTPSGATGSPGSSPSASTGTGPGASPGTSSTGSPGSEPATSGSETPGTSESATPESGPGSPAGSPTSTEEGSSTPSGATGSPGSSPSASTGTGPGASPGTSSTGSPGTSESATPESGPGTSTEPSEGSAPGTSTEPSEGSAPGDPSKKQGPWLEEEEEAYGWMDF

SEQ ID NO: 1228 - protein, 1341 aa, Artificial Sequence
  Description of Artificial Sequence: Synthetic polypeptide
GTSTEPSEGSAPGSEPATSGSETPGSPAGSPTSTEEGSTSSTAESPGPGTSTPESGSASPGSTSESPSGTAPGSTSESPSGTAPGTSTPESGSASPGTSTPESGSASPGSEPATSGSETPGTSESATPESGPGSPAGSPTSTEEGTSTEPSEGSAPGTSESATPESGPGTSTEPSEGSAPGTSTEPSEGSAPGSPAGSPTSTEEGTSTEPSEGSAPGTSTEPSEGSAPGTSESATPESGPGTSESATPESGPGTSTEPSEGSAPGTSTEPSEGSAPGTSESATPESGPGTSTEPSEGSAPGSEPATSGSETPGSPAGSPTSTEEGSSTPSGATGSPGTPGSGTASSSPGSSTPSGATGSPGTSTEPSEGSAPGTSTEPSEGSAPGSEPATSGSETPGSPAGSPTSTEEGSPAGSPTSTEEGTSTEPSEGSAPGPEPTGPAPSGGSEPATSGSETPGTSESATPESGPGSPAGSPTSTEEGTSESATPESGPGSPAGSPTSTEEGSPAGSPTSTEEGTSESATPESGPGSPAGSPTSTEEGSPAGSPTSTEEGSTSSTAESPGPGSTSESPSGTAPGTSPSGESSTAPGSTSESPSGTAPGSTSESPSGTAPGTSPSGESSTAPGTSTEPSEGSAPGTSESATPESGPGTSESATPESGPGSEPATSGSETPGTSESATPESGPGTSESATPESGPGTSTEPSEGSAPGTSESATPESGPGTSTEPSEGSAPGTSPSGESSTAPGTSPSGESSTAPGTSPSGESSTAPGTSTEPSEGSAPGSPAGSPTSTEEGTSTEPSEGSAPGSSPSASTGTGPGSSTPSGATGSPGSSTPSGATGSPGSSTPSGATGSPGSSTPSGATGSPGASPGTSSTGSPGASASGAPSTGGTSPSGESSTAPGSTSSTAESPGPGTSPSGESSTAPGTSESATPESGPGTSTEPSEGSAPGTSTEPSEGSAPGSSPSASTGTGPGSSTPSGATGSPGASPGTSSTGSPGTSTPESGSASPGTSPSGESSTAPGTSPSGESSTAPGTSESATPESGPGSEPATSGSETPGTSTEPSEGSAPGSTSESPSGTAPGSTSESPSGTAPGTSTPESGSASPGSPAGSPTSTEEGTSESATPESGPGTSTEPSEGSAPGSPAGSPTSTEEGTSESATPESGPGSEPATSGSETPGSSTPSGATGSPGASPGTSSTGSPGSSTPSGATGSPGSTSESPSGTAPGTSPSGESSTAPGSTSSTAESPGPGSSTPSGATGSPGASPGTSSTGSPGTPGSGTASSSPGSPAGSPTSTEEGSPAGSPTSTEEGTSTEPSEGSAPGDPSKKQGPWLEEEEEAYGWMDF

SEQ ID NO: 1229 - protein, 174 aa, Artificial Sequence
  Description of Artificial Sequence: Synthetic polypeptide
HSQGTFTSDYSKYLDSRRAQDFVQWLMNTGGSEPATSGSETPGTSESATPESGPGSEPATSGSETPGSPAGSPTSTEEGTSTEPSEGSAPGSEPATSGSETPGSEPATSGSETPGSEPATSGSETPGTSTEPSEGSAPGTSESATPESGPGSEPATSGSETPGTSTEPSEGSAP

SEQ ID NO: 1230 - protein, 174 aa, Artificial Sequence
  Description of Artificial Sequence: Synthetic polypeptide
HSQGTFTSDYSKYLDSRRAQDFVQWLMNTGGTSTPESGSASPGTSPSGESSTAPGTSPSGESSTAPGSTSSTAESPGPGSTSESPSGTAPGSTSSTAESPGPGTSPSGESSTAPGTSTPESGSASPGSTSSTAESPGPGTSPSGESSTAPGTSPSGESSTAPGTSPSGESSTAP

SEQ ID NO: 1231 - protein, 318 aa, Artificial Sequence
  Description of Artificial Sequence: Synthetic polypeptide
HSQGTFTSDYSKYLDSRRAQDFVQWLMNTGGTSESATPESGPGSEPATSGSETPGTSESATPESGPGSEPATSGSETPGTSESATPESGPGTSTEPSEGSAPGSPAGSPTSTEEGTSESATPESGPGSEPATSGSETPGTSESATPESGPGSPAGSPTSTEEGSPAGSPTSTEEGTSTEPSEGSAPGTSESATPESGPGTSESATPESGPGTSESATPESGPGSEPATSGSETPGSEPATSGSETPGSPAGSPTSTEEGTSTEPSEGSAPGTSTEPSEGSAPGSEPATSGSETPGTSESATPESGPGTSTEPSEGSAP

SEQ ID NO: 1232 - protein, 606 aa, Artificial Sequence
  Description of Artificial Sequence: Synthetic polypeptide
HSQGTFTSDYSKYLDSRRAQDFVQWLMNTGGSPAGSPTSTEEGTSESATPESGPGTSTEPSEGSAPGSPAGSPTSTEEGTSTEPSEGSAPGTSTEPSEGSAPGTSESATPESGPGSEPATSGSETPGSEPATSGSETPGSPAGSPTSTEEGTSESATPESGPGTSTEPSEGSAPGTSTEPSEGSAPGSPAGSPTSTEEGTSTEPSEGSAPGTSTEPSEGSAPGTSESATPESGPGTSTEPSEGSAPGTSESATPESGPGSEPATSGSETPGTSTEPSEGSAPGTSTEPSEGSAPGTSESATPESGPGTSESATPESGPGSPAGSPTSTEEGTSESATPESGPGSEPATSGSETPGTSESATPESGPGTSTEPSEGSAPGTSTEPSEGSAPGTSTEPSEGSAPGTSTEPSEGSAPGTSTEPSEGSAPGTSTEPSEGSAPGSPAGSPTSTEEGTSTEPSEGSAPGTSESATPESGPGSEPATSGSETPGTSESATPESGPGSEPATSGSETPGTSESATPESGPGTSTEPSEGSAPGTSESATPESGPGSPAGSPTSTEEGSPAGSPTSTEEGSPAGSPTSTEEGTSESATPESGPGTSTEPSEGSAP

SEQ ID NO: 1233 - protein, 606 aa, Artificial Sequence
  Description of Artificial Sequence: Synthetic polypeptide
HSQGTFTSDYSKYLDSRRAQDFVQWLMNTGGSTSSTAESPGPGSTSSTAESPGPGSTSESPSGTAPGSTSSTAESPGPGSTSSTAESPGPGTSTPESGSASPGSTSESPSGTAPGTSPSGESSTAPGSTSESPSGTAPGSTSESPSGTAPGTSPSGESSTAPGSTSESPSGTAPGSTSESPSGTAPGTSPSGESSTAPGSTSESPSGTAPGSTSESPSGTAPGSTSESPSGTAPGTSTPESGSASPGSTSESPSGTAPGTSTPESGSASPGSTSSTAESPGPGSTSSTAESPGPGTSTPESGSASPGTSTPESGSASPGSTSESPSGTAPGTSTPESGSASPGTSTPESGSASPGSTSESPSGTAPGSTSESPSGTAPGSTSESPSGTAPGSTSSTAESPGPGTSTPESGSASPGTSTPESGSASPGSTSESPSGTAPGSTSESPSGTAPGTSTPESGSASPGSTSESPSGTAPGSTSESPSGTAPGTSTPESGSASPGTSPSGESSTAPGSTSSTAESPGPGTSPSGESSTAPGSTSSTAESPGPGTSTPESGSASPGSTSESPSGTAPGSTSSTAESPGPGTSTPESGSASPGTSTPESGSASP

SEQ ID NO: 1234 - protein, 866 aa, Artificial Sequence
  Description of Artificial Sequence: Synthetic polypeptide
HSQGTFTSDYSKYLDSRRAQDFVQWLMNTGGSSESGSSEGGPGSSESGSSEGGPGESPGGSSGSESGSGGEPSESGSSGESPGGSSGSESGESPGGSSGSESGSSESGSSEGGPGSSESGSSEGGPGSSESGSSEGGPGESPGGSSGSESGESPGGSSGSESGESPGGSSGSESGSSESGSSEGGPGSSESGSSEGGPGSSESGSSEGGPGSSESGSSEGGPGSSESGSSEGGPGSSESGSSEGGPGSGGEPSESGSSGESPGGSSGSESGESPGGSSGSESGSGGEPSESGSSGSEGSSGPGESSGSSESGSSEGGPGSGGEPSESGSSGSEGSSGPGESSGSSESGSSEGGPGSGGEPSESGSSGESPGGSSGSESGSGGEPSESGSSGSGGEPSESGSSGSSESGSSEGGPGSGGEPSESGSSGSGGEPSESGSSGSEGSSGPGESSGESPGGSSGSESGSEGSSGPGESSGSEGSSGPGESSGSGGEPSESGSSGSSESGSSEGGPGSSESGSSEGGPGESPGGSSGSESGSGGEPSESGSSGSEGSSGPGESSGESPGGSSGSESGSEGSSGPGSSESGSSEGGPGSGGEPSESGSSGSEGSSGPGESSGSEGSSGPGESSGSEGSSGPGESSGSGGEPSESGSSGSGGEPSESGSSGESPGGSSGSESGESPGGSSGSESGSGGEPSESGSSGSEGSSGPGESSGESPGGSSGSESGSSESGSSEGGPGSSESGSSEGGPGSSESGSSEGGPGSGGEPSESGSSGSSESGSSEGGPGESPGGSSGSESGSGGEPSESGSSGSSESGSSEGGPGESPGGSSGSESGSGGEPSESGSSGESPGGSSGSESGSGGEPSESGSS

SEQ ID NO: 1235 - protein, 894 aa, Artificial Sequence
  Description of Artificial Sequence: Synthetic polypeptide
HSQGTFTSDYSKYLDSRRAQDFVQWLMNTGGSPAGSPTSTEEGTSESATPESGPGTSTEPSEGSAPGSPAGSPTSTEEGTSTEPSEGSAPGTSTEPSEGSAPGTSESATPESGPGSEPATSGSETPGSEPATSGSETPGSPAGSPTSTEEGTSESATPESGPGTSTEPSEGSAPGTSTEPSEGSAPGSPAGSPTSTEEGTSTEPSEGSAPGTSTEPSEGSAPGTSESATPESGPGTSTEPSEGSAPGTSESATPESGPGSEPATSGSETPGTSTEPSEGSAPGTSTEPSEGSAPGTSESATPESGPGTSESATPESGPGSPAGSPTSTEEGTSESATPESGPGSEPATSGSETPGTSESATPESGPGTSTEPSEGSAPGTSTEPSEGSAPGTSTEPSEGSAPGTSTEPSEGSAPGTSTEPSEGSAPGTSTEPSEGSAPGSPAGSPTSTEEGTSTEPSEGSAPGTSESATPESGPGSEPATSGSETPGTSESATPESGPGSEPATSGSETPGTSESATPESGPGTSTEPSEGSAPGTSESATPESGPGSPAGSPTSTEEGSPAGSPTSTEEGSPAGSPTSTEEGTSESATPESGPGTSTEPSEGSAPGTSESATPESGPGSEPATSGSETPGTSESATPESGPGSEPATSGSETPGTSESATPESGPGTSTEPSEGSAPGSPAGSPTSTEEGTSESATPESGPGSEPATSGSETPGTSESATPESGPGSPAGSPTSTEEGSPAGSPTSTEEGTSTEPSEGSAPGTSESATPESGPGTSESATPESGPGTSESATPESGPGSEPATSGSETPGSEPATSGSETPGSPAGSPTSTEEGTSTEPSEGSAPGTSTEPSEGSAPGSEPATSGSETPGTSESATPESGPGTSTEPSEGSAP

SEQ ID NO: 1236 - protein, 905 aa, Artificial Sequence
  Description of Artificial Sequence: Synthetic polypeptide
  MOD_RES (460)..(462): Any amino acid
  MOD_RES (473)..(476): Any amino acid
HSQGTFTSDYSKYLDSRRAQDFVQWLMNTGGSTSESPSGTAPGTSPSGESSTAPGSTSESPSGTAPGSTSESPSGTAPGTSTPESGSASPGTSTPESGSASPGSTSESPSGTAPGSTSESPSGTAPGTSPSGESSTAPGSTSESPSGTAPGTSPSGESSTAPGTSPSGESSTAPGSTSSTAESPGPGTSPSGESSTAPGTSPSGESSTAPGSTSSTAESPGPGTSTPESGSASPGTSTPESGSASPGSTSESPSGTAPGSTSESPSGTAPGTSTPESGSASPGSTSSTAESPGPGTSTPESGSASPGSTSESPSGTAPGTSPSGESSTAPGSTSSTAESPGPGTSPSGESSTAPGTSTPESGSASPGSTSSTAESPGPGSTSSTAESPGPGSTSSTAESPGPGSTSSTAESPGPGTSPSGESSTAPGSTSESPSGTAPGSTSESPSGTAPGTSTPESGPXXXGASASGAPSTXXXXSESPSGTAPGSTSESPSGTAPGSTSESPSGTAPGSTSESPSGTAPGSTSESPSGTAPGSTSESPSGTAPGTSTPESGSASPGTSPSGESSTAPGTSPSGESSTAPGSTSSTAESPGPGTSPSGESSTAPGTSTPESGSASPGSTSESPSGTAPGSTSESPSGTAPGTSPSGESSTAPGSTSESPSGTAPGTSTPESGSASPGTSTPESGSASPGSTSESPSGTAPGTSTPESGSASPGSTSSTAESPGPGSTSESPSGTAPGSTSESPSGTAPGTSPSGESSTAPGSTSSTAESPGPGTSPSGESSTAPGTSTPESGSASPGTSPSGESSTAPGTSPSGESSTAPGTSPSGESSTAPGSTSSTAESPGPGSTSSTAESPGPGTSPSGESSTAPGSSPSASTGTGPGSSTPSGATGSPGSSTPSGATGSP

SEQ ID NO: 1237 - protein, 894 aa, Artificial Sequence
  Description of Artificial Sequence: Synthetic polypeptide
HSQGTFTSDYSKYLDSRRAQDFVQWLMNTGGASPGTSSTGSPGSSPSASTGTGPGSSPSASTGTGPGTPGSGTASSSPGSSTPSGATGSPGSNPSASTGTGPGASPGTSSTGSPGTPGSGTASSSPGSSTPSGATGSPGTPGSGTASSSPGASPGTSSTGSPGASPGTSSTGSPGTPGSGTASSSPGSSTPSGATGSPGASPGTSSTGSPGTPGSGTASSSPGSSTPSGATGSPGSNPSASTGTGPGSSPSASTGTGPGSSTPSGATGSPGSSTPSGATGSPGASPGTSSTGSPGASPGTSSTGSPGASPGTSSTGSPGTPGSGTASSSPGASPGTSSTGSPGASPGTSSTGSPGASPGTSSTGSPGSSPSASTGTGPGTPGSGTASSSPGASPGTSSTGSPGASPGTSSTGSPGASPGTSSTGSPGSSTPSGATGSPGSSTPSGATGSPGASPGTSSTGSPGTPGSGTASSSPGSSTPSGATGSPGSSTPSGATGSPGSSTPSGATGSPGSSPSASTGTGPGASPGTSSTGSPGASPGTSSTGSPGTPGSGTASSSPGASPGTSSTGSPGASPGTSSTGSPGASPGTSSTGSPGASPGTSSTGSPGTPGSGTASSSPGSSTPSGATGSPGTPGSGTASSSPGSSTPSGATGSPGTPGSGTASSSPGSSTPSGATGSPGSSTPSGATGSPGSSPSASTGTGPGSSPSASTGTGPGASPGTSSTGSPGTPGSGTASSSPGSSTPSGATGSPGSSPSASTGTGPGSSPSASTGTGPGASPGTSSTGSPGASPGTSSTGSPGSSTPSGATGSPGSSPSASTGTGPGASPGTSSTGSPGSSPSASTGTGPGTPGSGTASSSPGSSTPSGATGSPGSSTPSGATGSPGASPGTSSTGSP

SEQ ID NO: 1238 - protein, 905 aa, Artificial Sequence
  Description of Artificial Sequence: Synthetic polypeptide
HSQGTFTSDYSKYLDSRRAQDFVQWLMNTGGTSTEPSEGSAPGSEPATSGSETPGSPAGSPTSTEEGSTSSTAESPGPGTSTPESGSASPGSTSESPSGTAPGSTSESPSGTAPGTSTPESGSASPGTSTPESGSASPGSEPATSGSETPGTSESATPESGPGSPAGSPTSTEEGTSTEPSEGSAPGTSESATPESGPGTSTEPSEGSAPGTSTEPSEGSAPGSPAGSPTSTEEGTSTEPSEGSAPGTSTEPSEGSAPGTSESATPESGPGTSESATPESGPGTSTEPSEGSAPGTSTEPSEGSAPGTSESATPESGPGTSTEPSEGSAPGSEPATSGSETPGSPAGSPTSTEEGSSTPSGATGSPGTPGSGTASSSPGSSTPSGATGSPGTSTEPSEGSAPGTSTEPSEGSAPGSEPATSGSETPGSPAGSPTSTEEGSPAGSPTSTEEGTSTEPSEGSAPGASASGAPSTGGTSESATPESGPGSPAGSPTSTEEGSPAGSPTSTEEGSTSSTAESPGPGSTSESPSGTAPGTSPSGESSTAPGTPGSGTASSSPGSSTPSGATGSPGSSPSASTGTGPGSEPATSGSETPGTSESATPESGPGSEPATSGSETPGSTSSTAESPGPGSTSSTAESPGPGTSPSGESSTAPGSEPATSGSETPGSEPATSGSETPGTSTEPSEGSAPGSTSSTAESPGPGTSTPESGSASPGSTSESPSGTAPGTSTEPSEGSAPGTSTEPSEGSAPGTSTEPSEGSAPGSSTPSGATGSPGSSPSASTGTGPGASPGTSSTGSPGSEPATSGSETPGTSESATPESGPGSPAGSPTSTEEGSSTPSGATGSPGSSPSASTGTGPGASPGTSSTGSPGTSESATPESGPGTSTEPSEGSAPGTSTEPSEGSAP

SEQ ID NO: 1239 - protein, 1348 aa, Artificial Sequence
  Description of Artificial Sequence: Synthetic polypeptide
HSQGTFTSDYSKYLDSRRAQDFVQWLMNTGGTSTEPSEGSAPGSEPATSGSETPGSPAGSPTSTEEGSTSSTAESPGPGTSTPESGSASPGSTSESPSGTAPGSTSESPSGTAPGTSTPESGSASPGTSTPESGSASPGSEPATSGSETPGTSESATPESGPGSPAGSPTSTEEGTSTEPSEGSAPGTSESATPESGPGTSTEPSEGSAPGTSTEPSEGSAPGSPAGSPTSTEEGTSTEPSEGSAPGTSTEPSEGSAPGTSESATPESGPGTSESATPESGPGTSTEPSEGSAPGTSTEPSEGSAPGTSESATPESGPGTSTEPSEGSAPGSEPATSGSETPGSPAGSPTSTEEGSSTPSGATGSPGTPGSGTASSSPGSSTPSGATGSPGTSTEPSEGSAPGTSTEPSEGSAPGSEPATSGSETPGSPAGSPTSTEEGSPAGSPTSTEEGTSTEPSEGSAPGPEPTGPAPSGGSEPATSGSETPGTSESATPESGPGSPAGSPTSTEEGTSESATPESGPGSPAGSPTSTEEGSPAGSPTSTEEGTSESATPESGPGSPAGSPTSTEEGSPAGSPTSTEEGSTSSTAESPGPGSTSESPSGTAPGTSPSGESSTAPGSTSESPSGTAPGSTSESPSGTAPGTSPSGESSTAPGTSTEPSEGSAPGTSESATPESGPGTSESATPESGPGSEPATSGSETPGTSESATPESGPGTSESATPESGPGTSTEPSEGSAPGTSESATPESGPGTSTEPSEGSAPGTSPSGESSTAPGTSPSGESSTAPGTSPSGESSTAPGTSTEPSEGSAPGSPAGSPTSTEEGTSTEPSEGSAPGSSPSASTGTGPGSSTPSGATGSPGSSTPSGATGSPGSSTPSGATGSPGSSTPSGATGSPGASPGTSSTGSPGASASGAPSTGGTSPSGESSTAPGSTSSTAESPGPGTSPSGESSTAPGTSESATPESGPGTSTEPSEGSAPGTSTEPSEGSAPGSSPSASTGTGPGSSTPSGATGSPGASPGTSSTGSPGTSTPESGSASPGTSPSGESSTAPGTSPSGESSTAPGTSESATPESGPGSEPATSGSETPGTSTEPSEGSAPGSTSESPSGTAPGSTSESPSGTAPGTSTPESGSASPGSPAGSPTSTEEGTSESATPESGPGTSTEPSEGSAPGSPAGSPTSTEEGTSESATPESGPGSEPATSGSETPGSSTPSGATGSPGASPGTSSTGSPGSSTPSGATGSPGSTSESPSGTAPGTSPSGESSTAPGSTSSTAESPGPGSSTPSGATGSPGASPGTSSTGSPGTPGSGTASSSPGSPAGSPTSTEEGSPAGSPTSTEEGTSTEPSEGSAP

SEQ ID NO: 1240 - protein, 354 aa, Artificial Sequence; identical to SEQ ID NO: 877
  Description of Artificial Sequence: Synthetic polypeptide

SEQ ID NO: 1241 - protein, 943 aa, Artificial Sequence
  Description of Artificial Sequence: Synthetic polypeptide
MAEPAGSPTSTEEGTPGSGTASSSPGSSTPSGATGSPGASPGTSSTGSPGSPAGSPTSTEEGTSESATPESGPGTSTEPSEGSAPGSPAGSPTSTEEGTSTEPSEGSAPGTSTEPSEGSAPGTSESATPESGPGSEPATSGSETPGSEPATSGSETPGSPAGSPTSTEEGTSESATPESGPGTSTEPSEGSAPGTSTEPSEGSAPGSPAGSPTSTEEGTSTEPSEGSAPGTSTEPSEGSAPGTSESATPESGPGTSTEPSEGSAPGTSESATPESGPGSEPATSGSETPGTSTEPSEGSAPGTSTEPSEGSAPGTSESATPESGPGTSESATPESGPGSPAGSPTSTEEGTSESATPESGPGSEPATSGSETPGTSESATPESGPGTSTEPSEGSAPGTSTEPSEGSAPGTSTEPSEGSAPGTSTEPSEGSAPGTSTEPSEGSAPGTSTEPSEGSAPGSPAGSPTSTEEGTSTEPSEGSAPGTSESATPESGPGSEPATSGSETPGTSESATPESGPGSEPATSGSETPGTSESATPESGPGTSTEPSEGSAPGTSESATPESGPGSPAGSPTSTEEGSPAGSPTSTEEGSPAGSPTSTEEGTSESATPESGPGTSTEPSEGSAPGTSESATPESGPGSEPATSGSETPGTSESATPESGPGSEPATSGSETPGTSESATPESGPGTSTEPSEGSAPGSPAGSPTSTEEGTSESATPESGPGSEPATSGSETPGTSESATPESGPGSPAGSPTSTEEGSPAGSPTSTEEGTSTEPSEGSAPGTSESATPESGPGTSESATPESGPGTSESATPESGPGSEPATSGSETPGSEPATSGSETPGSPAGSPTSTEEGTSTEPSEGSAPGTSTEPSEGSAPGSEPATSGSETPGTSESATPESGPGTSTEPSEGSAPGHSQGTFTSDYSKYLDSRRAQDFVQWLMNT

SEQ ID NO: 1242 - protein, 954 aa, Artificial Sequence
  Description of Artificial Sequence: Synthetic polypeptide
MAEPAGSPTSTEEGASPGTSSTGSPGSSTPSGATGSPGSSTPSGATGSPGTSTEPSEGSAPGSEPATSGSETPGSPAGSPTSTEEGSTSSTAESPGPGTSTPESGSASPGSTSESPSGTAPGSTSESPSGTAPGTSTPESGSASPGTSTPESGSASPGSEPATSGSETPGTSESATPESGPGSPAGSPTSTEEGTSTEPSEGSAPGTSESATPESGPGTSTEPSEGSAPGTSTEPSEGSAPGSPAGSPTSTEEGTSTEPSEGSAPGTSTEPSEGSAPGTSESATPESGPGTSESATPESGPGTSTEPSEGSAPGTSTEPSEGSAPGTSESATPESGPGTSTEPSEGSAPGSEPATSGSETPGSPAGSPTSTEEGSSTPSGATGSPGTPGSGTASSSPGSSTPSGATGSPGTSTEPSEGSAPGTSTEPSEGSAPGSEPATSGSETPGSPAGSPTSTEEGSPAGSPTSTEEGTSTEPSEGSAPGASASGAPSTGGTSESATPESGPGSPAGSPTSTEEGSPAGSPTSTEEGSTSSTAESPGPGSTSESPSGTAPGTSPSGESSTAPGTPGSGTASSSPGSSTPSGATGSPGSSPSASTGTGPGSEPATSGSETPGTSESATPESGPGSEPATSGSETPGSTSSTAESPGPGSTSSTAESPGPGTSPSGESSTAPGSEPATSGSETPGSEPATSGSETPGTSTEPSEGSAPGSTSSTAESPGPGTSTPESGSASPGSTSESPSGTAPGTSTEPSEGSAPGTSTEPSEGSAPGTSTEPSEGSAPGSSTPSGATGSPGSSPSASTGTGPGASPGTSSTGSPGSEPATSGSETPGTSESATPESGPGSPAGSPTSTEEGSSTPSGATGSPGSSPSASTGTGPGASPGTSSTGSPGTSESATPESGPGTSTEPSEGSAPGTSTEPSEGSAPGHSQGTFTSDYSKYLDSRRAQDFVQWLMNT

SEQ ID NO: 1243 - protein, 174 aa, Artificial Sequence
  Description of Artificial Sequence: Synthetic polypeptide
GSEPATSGSETPGTSESATPESGPGSEPATSGSETPGSPAGSPTSTEEGTSTEPSEGSAPGSEPATSGSETPGSEPATSGSETPGSEPATSGSETPGTSTEPSEGSAPGTSESATPESGPGSEPATSGSETPGTSTEPSEGSAPGHSQGTFTSDYSKYLDSRRAQDFVQWLMNT

SEQ ID NO: 1244 - protein, 174 aa, Artificial Sequence
  Description of Artificial Sequence: Synthetic polypeptide
GTSTPESGSASPGTSPSGESSTAPGTSPSGESSTAPGSTSSTAESPGPGSTSESPSGTAPGSTSSTAESPGPGTSPSGESSTAPGTSTPESGSASPGSTSSTAESPGPGTSPSGESSTAPGTSPSGESSTAPGTSPSGESSTAPGHSQGTFTSDYSKYLDSRRAQDFVQWLMNT

SEQ ID NO: 1245 - protein, 318 aa, Artificial Sequence
  Description of Artificial Sequence: Synthetic polypeptide
GTSESATPESGPGSEPATSGSETPGTSESATPESGPGSEPATSGSETPGTSESATPESGPGTSTEPSEGSAPGSPAGSPTSTEEGTSESATPESGPGSEPATSGSETPGTSESATPESGPGSPAGSPTSTEEGSPAGSPTSTEEGTSTEPSEGSAPGTSESATPESGPGTSESATPESGPGTSESATPESGPGSEPATSGSETPGSEPATSGSETPGSPAGSPTSTEEGTSTEPSEGSAPGTSTEPSEGSAPGSEPATSGSETPGTSESATPESGPGTSTEPSEGSAPGHSQGTFTSDYSKYLDSRRAQDFVQWLMNT

SEQ ID NO: 1246 - protein, 606 aa, Artificial Sequence
  Description of Artificial Sequence: Synthetic polypeptide
GSPAGSPTSTEEGTSESATPESGPGTSTEPSEGSAPGSPAGSPTSTEEGTSTEPSEGSAPGTSTEPSEGSAPGTSESATPESGPGSEPATSGSETPGSEPATSGSETPGSPAGSPTSTEEGTSESATPESGPGTSTEPSEGSAPGTSTEPSEGSAPGSPAGSPTSTEEGTSTEPSEGSAPGTSTEPSEGSAPGTSESATPESGPGTSTEPSEGSAPGTSESATPESGPGSEPATSGSETPGTSTEPSEGSAPGTSTEPSEGSAPGTSESATPESGPGTSESATPESGPGSPAGSPTSTEEGTSESATPESGPGSEPATSGSETPGTSESATPESGPGTSTEPSEGSAPGTSTEPSEGSAPGTSTEPSEGSAPGTSTEPSEGSAPGTSTEPSEGSAPGTSTEPSEGSAPGSPAGSPTSTEEGTSTEPSEGSAPGTSESATPESGPGSEPATSGSETPGTSESATPESGPGSEPATSGSETPGTSESATPESGPGTSTEPSEGSAPGTSESATPESGPGSPAGSPTSTEEGSPAGSPTSTEEGSPAGSPTSTEEGTSESATPESGPGTSTEPSEGSAPGHSQGTFTSDYSKYLDSRRAQDFVQWLMNT

SEQ ID NO: 1247 - protein, 606 aa, Artificial Sequence
  Description of Artificial Sequence: Synthetic polypeptide
GSTSSTAESPGPGSTSSTAESPGPGSTSESPSGTAPGSTSSTAESPGPGSTSSTAESPGPGTSTPESGSASPGSTSESPSGTAPGTSPSGESSTAPGSTSESPSGTAPGSTSESPSGTAPGTSPSGESSTAPGSTSESPSGTAPGSTSESPSGTAPGTSPSGESSTAPGSTSESPSGTAPGSTSESPSGTAPGSTSESPSGTAPGTSTPESGSASPGSTSESPSGTAPGTSTPESGSASPGSTSSTAESPGPGSTSSTAESPGPGTSTPESGSASPGTSTPESGSASPGSTSESPSGTAPGTSTPESGSASPGTSTPESGSASPGSTSESPSGTAPGSTSESPSGTAPGSTSESPSGTAPGSTSSTAESPGPGTSTPESGSASPGTSTPESGSASPGSTSESPSGTAPGSTSESPSGTAPGTSTPESGSASPGSTSESPSGTAPGSTSESPSGTAPGTSTPESGSASPGTSPSGESSTAPGSTSSTAESPGPGTSPSGESSTAPGSTSSTAESPGPGTSTPESGSASPGSTSESPSGTAPGSTSSTAESPGPGTSTPESGSASPGTSTPESGSASPGHSQGTFTSDYSKYLDSRRAQDFVQWLMNT

SEQ ID NO: 1248 - protein, 866 aa, Artificial Sequence
  Description of Artificial Sequence: Synthetic polypeptide
GSSESGSSEGGPGSSESGSSEGGPGESPGGSSGSESGSGGEPSESGSSGESPGGSSGSESGESPGGSSGSESGSSESGSSEGGPGSSESGSSEGGPGSSESGSSEGGPGESPGGSSGSESGESPGGSSGSESGESPGGSSGSESGSSESGSSEGGPGSSESGSSEGGPGSSESGSSEGGPGSSESGSSEGGPGSSESGSSEGGPGSSESGSSEGGPGSGGEPSESGSSGESPGGSSGSESGESPGGSSGSESGSGGEPSESGSSGSEGSSGPGESSGSSESGSSEGGPGSGGEPSESGSSGSEGSSGPGESSGSSESGSSEGGPGSGGEPSESGSSGESPGGSSGSESGSGGEPSESGSSGSGGEPSESGSSGSSESGSSEGGPGSGGEPSESGSSGSGGEPSESGSSGSEGSSGPGESSGESPGGSSGSESGSEGSSGPGESSGSEGSSGPGESSGSGGEPSESGSSGSSESGSSEGGPGSSESGSSEGGPGESPGGSSGSESGSGGEPSESGSSGSEGSSGPGESSGESPGGSSGSESGSEGSSGPGSSESGSSEGGPGSGGEPSESGSSGSEGSSGPGESSGSEGSSGPGESSGSEGSSGPGESSGSGGEPSESGSSGSGGEPSESGSSGESPGGSSGSESGESPGGSSGSESGSGGEPSESGSSGSEGSSGPGESSGESPGGSSGSESGSSESGSSEGGPGSSESGSSEGGPGSSESGSSEGGPGSGGEPSESGSSGSSESGSSEGGPGESPGGSSGSESGSGGEPSESGSSGSSESGSSEGGPGESPGGSSGSESGSGGEPSESGSSGESPGGSSGSESGSGGEPSESGSSGHSQGTFTSDYSKYLDSRRAQDFVQWLMNT

SEQ ID NO: 1249 - protein, 894 aa, Artificial Sequence
  Description of Artificial Sequence: Synthetic polypeptide
GSPAGSPTSTEEGTSESATPESGPGTSTEPSEGSAPGSPAGSPTSTEEGTSTEPSEGSAPGTSTEPSEGSAPGTSESATPESGPGSEPATSGSETPGSEPATSGSETPGSPAGSPTSTEEGTSESATPESGPGTSTEPSEGSAPGTSTEPSEGSAPGSPAGSPTSTEEGTSTEPSEGSAPGTSTEPSEGSAPGTSESATPESGPGTSTEPSEGSAPGTSESATPESGPGSEPATSGSETPGTSTEPSEGSAPGTSTEPSEGSAPGTSESATPESGPGTSESATPESGPGSPAGSPTSTEEGTSESATPESGPGSEPATSGSETPGTSESATPESGPGTSTEPSEGSAPGTSTEPSEGSAPGTSTEPSEGSAPGTSTEPSEGSAPGTSTEPSEGSAPGTSTEPSEGSAPGSPAGSPTSTEEGTSTEPSEGSAPGTSESATPESGPGSEPATSGSETPGTSESATPESGPGSEPATSGSETPGTSESATPESGPGTSTEPSEGSAPGTSESATPESGPGSPAGSPTSTEEGSPAGSPTSTEEGSPAGSPTSTEEGTSESATPESGPGTSTEPSEGSAPGTSESATPESGPGSEPATSGSETPGTSESATPESGPGSEPATSGSETPGTSESATPESGPGTSTEPSEGSAPGSPAGSPTSTEEGTSESATPESGPGSEPATSGSETPGTSESATPESGPGSPAGSPTSTEEGSPAGSPTSTEEGTSTEPSEGSAPGTSESATPESGPGTSESATPESGPGTSESATPESGPGSEPATSGSETPGSEPATSGSETPGSPAGSPTSTEEGTSTEPSEGSAPGTSTEPSEGSAPGSEPATSGSETPGTSESATPESGPGTSTEPSEGSAPGHSQGTFTSDYSKYLDSRRAQDFVQWLMNT

SEQ ID NO: 1250 - protein, 905 aa, Artificial Sequence
  Description of Artificial Sequence: Synthetic polypeptide
  MOD_RES (430)..(432): Any amino acid
  MOD_RES (443)..(446): Any amino acid
GSTSESPSGTAPGTSPSGESSTAPGSTSESPSGTAPGSTSESPSGTAPGTSTPESGSASPGTSTPESGSASPGSTSESPSGTAPGSTSESPSGTAPGTSPSGESSTAPGSTSESPSGTAPGTSPSGESSTAPGTSPSGESSTAPGSTSSTAESPGPGTSPSGESSTAPGTSPSGESSTAPGSTSSTAESPGPGTSTPESGSASPGTSTPESGSASPGSTSESPSGTAPGSTSESPSGTAPGTSTPESGSASPGSTSSTAESPGPGTSTPESGSASPGSTSESPSGTAPGTSPSGESSTAPGSTSSTAESPGPGTSPSGESSTAPGTSTPESGSASPGSTSSTAESPGPGSTSSTAESPGPGSTSSTAESPGPGSTSSTAESPGPGTSPSGESSTAPGSTSESPSGTAPGSTSESPSGTAPGTSTPESGPXXXGASASGAPSTXXXXSESPSGTAPGSTSESPSGTAPGSTSESPSGTAPGSTSESPSGTAPGSTSESPSGTAPGSTSESPSGTAPGTSTPESGSASPGTSPSGESSTAPGTSPSGESSTAPGSTSSTAESPGPGTSPSGESSTAPGTSTPESGSASPGSTSESPSGTAPGSTSESPSGTAPGTSPSGESSTAPGSTSESPSGTAPGTSTPESGSASPGTSTPESGSASPGSTSESPSGTAPGTSTPESGSASPGSTSSTAESPGPGSTSESPSGTAPGSTSESPSGTAPGTSPSGESSTAPGSTSSTAESPGPGTSPSGESSTAPGTSTPESGSASPGTSPSGESSTAPGTSPSGESSTAPGTSPSGESSTAPGSTSSTAESPGPGSTSSTAESPGPGTSPSGESSTAPGSSPSASTGTGPGSSTPSGATGSPGSSTPSGATGSPGHSQGTFTSDYSKYLDSRRAQDFVQWLMNT

SEQ ID NO: 1251 - protein, 894 aa, Artificial Sequence
  Description of Artificial Sequence: Synthetic polypeptide
GASPGTSSTGSPGSSPSASTGTGPGSSPSASTGTGPGTPGSGTASSSPGSSTPSGATGSPGSNPSASTGTGPGASPGTSSTGSPGTPGSGTASSSPGSSTPSGATGSPGTPGSGTASSSPGASPGTSSTGSPGASPGTSSTGSPGTPGSGTASSSPGSSTPSGATGSPGASPGTSSTGSPGTPGSGTASSSPGSSTPSGATGSPGSNPSASTGTGPGSSPSASTGTGPGSSTPSGATGSPGSSTPSGATGSPGASPGTSSTGSPGASPGTSSTGSPGASPGTSSTGSPGTPGSGTASSSPGASPGTSSTGSPGASPGTSSTGSPGASPGTSSTGSPGSSPSASTGTGPGTPGSGTASSSPGASPGTSSTGSPGASPGTSSTGSPGASPGTSSTGSPGSSTPSGATGSPGSSTPSGATGSPGASPGTSSTGSPGTPGSGTASSSPGSSTPSGATGSPGSSTPSGATGSPGSSTPSGATGSPGSSPSASTGTGPGASPGTSSTGSPGASPGTSSTGSPGTPGSGTASSSPGASPGTSSTGSPGASPGTSSTGSPGASPGTSSTGSPGASPGTSSTGSPGTPGSGTASSSPGSSTPSGATGSPGTPGSGTASSSPGSSTPSGATGSPGTPGSGTASSSPGSSTPSGATGSPGSSTPSGATGSPGSSPSASTGTGPGSSPSASTGTGPGASPGTSSTGSPGTPGSGTASSSPGSSTPSGATGSPGSSPSASTGTGPGSSPSASTGTGPGASPGTSSTGSPGASPGTSSTGSPGSSTPSGATGSPGSSPSASTGTGPGASPGTSSTGSPGSSPSASTGTGPGTPGSGTASSSPGSSTPSGATGSPGSSTPSGATGSPGASPGTSSTGSPGHSQGTFTSDYSKYLDSRRAQDFVQWLMNT

SEQ ID NO: 1252 - protein, 905 aa, Artificial Sequence
  Description of Artificial Sequence: Synthetic polypeptide
GTSTEPSEGSAPGSEPATSGSETPGSPAGSPTSTEEGSTSSTAESPGPGTSTPESGSASPGSTSESPSGTAPGSTSESPSGTAPGTSTPESGSASPGTSTPESGSASPGSEPATSGSETPGTSESATPESGPGSPAGSPTSTEEGTSTEPSEGSAPGTSESATPESGPGTSTEPSEGSAPGTSTEPSEGSAPGSPAGSPTSTEEGTSTEPSEGSAPGTSTEPSEGSAPGTSESATPESGPGTSESATPESGPGTSTEPSEGSAPGTSTEPSEGSAPGTSESATPESGPGTSTEPSEGSAPGSEPATSGSETPGSPAGSPTSTEEGSSTPSGATGSPGTPGSGTASSSPGSSTPSGATGSPGTSTEPSEGSAPGTSTEPSEGSAPGSEPATSGSETPGSPAGSPTSTEEGSPAGSPTSTEEGTSTEPSEGSAPGASASGAPSTGGTSESATPESGPGSPAGSPTSTEEGSPAGSPTSTEEGSTSSTAESPGPGSTSESPSGTAPGTSPSGESSTAPGTPGSGTASSSPGSSTPSGATGSPGSSPSASTGTGPGSEPATSGSETPGTSESATPESGPGSEPATSGSETPGSTSSTAESPGPGSTSSTAESPGPGTSPSGESSTAPGSEPATSGSETPGSEPATSGSETPGTSTEPSEGSAPGSTSSTAESPGPGTSTPESGSASPGSTSESPSGTAPGTSTEPSEGSAPGTSTEPSEGSAPGTSTEPSEGSAPGSSTPSGATGSPGSSPSASTGTGPGASPGTSSTGSPGSEPATSGSETPGTSESATPESGPGSPAGSPTSTEEGSSTPSGATGSPGSSPSASTGTGPGASPGTSSTGSPGTSESATPESGPGTSTEPSEGSAPGTSTEPSEGSAPGHSQGTFTSDYSKYLDSRRAQDFVQWLMNT

SEQ ID NO: 1253 - protein, 1348 aa, Artificial Sequence
  Description of Artificial Sequence: Synthetic polypeptide
GTSTEPSEGSAPGSEPATSGSETPGSPAGSPTSTEEGSTSSTAESPGPGTSTPESGSASPGSTSESPSGTAPGSTSESPSGTAPGTSTPESGSASPGTSTPESGSASPGSEPATSGSETPGTSESATPESGPGSPAGSPTSTEEGTSTEPSEGSAPGTSESATPESGPGTSTEPSEGSAPGTSTEPSEGSAPGSPAGSPTSTEEGTSTEPSEGSAPGTSTEPSEGSAPGTSESATPESGPGTSESATPESGPGTSTEPSEGSAPGTSTEPSEGSAPGTSESATPESGPGTSTEPSEGSAPGSEPATSGSETPGSPAGSPTSTEEGSSTPSGATGSPGTPGSGTASSSPGSSTPSGATGSPGTSTEPSEGSAPGTSTEPSEGSAPGSEPATSGSETPGSPAGSPTSTEEGSPAGSPTSTEEGTSTEPSEGSAPGPEPTGPAPSGGSEPATSGSETPGTSESATPESGPGSPAGSPTSTEEGTSESATPESGPGSPAGSPTSTEEGSPAGSPTSTEEGTSESATPESGPGSPAGSPTSTEEGSPAGSPTSTEEGSTSSTAESPGPGSTSESPSGTAPGTSPSGESSTAPGSTSESPSGTAPGSTSESPSGTAPGTSPSGESSTAPGTSTEPSEGSAPGTSESATPESGPGTSESATPESGPGSEPATSGSETPGTSESATPESGPGTSESATPESGPGTSTEPSEGSAPGTSESATPESGPGTSTEPSEGSAPGTSPSGESSTAPGTSPSGESSTAPGTSPSGESSTAPGTSTEPSEGSAPGSPAGSPTSTEEGTSTEPSEGSAPGSSPSASTGTGPGSSTPSGATGSPGSSTPSGATGSPGSSTPSGATGSPGSSTPSGATGSPGASPGTSSTGSPGASASGAPSTGGTSPSGESSTAPGSTSSTAESPGPGTSPSGESSTAPGTSESATPESGPGTSTEPSEGSAPGTSTEPSEGSAPGSSPSASTGTGPGSSTPSGATGSPGASPGTSSTGSPGTSTPESGSASPGTSPSGESSTAPGTSPSGESSTAPGTSESATPESGPGSEPATSGSETPGTSTEPSEGSAPGSTSESPSGTAPGSTSESPSGTAPGTSTPESGSASPGSPAGSPTSTEEGTSESATPESGPGTSTEPSEGSAPGSPAGSPTSTEEGTSESATPESGPGSEPATSGSETPGSSTPSGATGSPGASPGTSSTGSPGSSTPSGATGSPGSTSESPSGTAPGTSPSGESSTAPGSTSSTAESPGPGSSTPSGATGSPGASPGTSSTGSPGTPGSGTASSSPGSPAGSPTSTEEGSPAGSPTSTEEGTSTEPSEGSAPGHSQGTFTSDYSKYLDSRRAQDFVQWLMNT

SEQ ID NO: 1254 - protein, 182 aa, Artificial Sequence
  Description of Artificial Sequence: Synthetic polypeptide
HDEFERHAEGTFTSDVSSTLEGQAALEFIAWLVKGRGGGSEPATSGSETPGTSESATPESGPGSEPATSGSETPGSPAGSPTSTEEGTSTEPSEGSAPGSEPATSGSETPGSEPATSGSETPGSEPATSGSETPGTSTEPSEGSAPGTSESATPESGPGSEPATSGSETPGTSTEPSEGSAP

SEQ ID NO: 1255 - protein, 182 aa, Artificial Sequence
  Description of Artificial Sequence: Synthetic polypeptide
HDEFERHAEGTFTSDVSSTLEGQAALEFIAWLVKGRGGGTSTPESGSASPGTSPSGESSTAPGTSPSGESSTAPGSTSSTAESPGPGSTSESPSGTAPGSTSSTAESPGPGTSPSGESSTAPGTSTPESGSASPGSTSSTAESPGPGTSPSGESSTAPGTSPSGESSTAPGTSPSGESSTAP

SEQ ID NO: 1256 - protein, 326 aa, Artificial Sequence
  Description of Artificial Sequence: Synthetic polypeptide
HDEFERHAEGTFTSDVSSTLEGQAALEFIAWLVKGRGGGTSESATPESGPGSEPATSGSETPGTSESATPESGPGSEPATSGSETPGTSESATPESGPGTSTEPSEGSAPGSPAGSPTSTEEGTSESATPESGPGSEPATSGSETPGTSESATPESGPGSPAGSPTSTEEGSPAGSPTSTEEGTSTEPSEGSAPGTSESATPESGPGTSESATPESGPGTSESATPESGPGSEPATSGSETPGSEPATSGSETPGSPAGSPTSTEEGTSTEPSEGSAPGTSTEPSEGSAPGSEPATSGSETPGTSESATPESGPGTSTEPSEGSAP

SEQ ID NO: 1257 - protein, 614 aa, Artificial Sequence
  Description of Artificial Sequence: Synthetic polypeptide
HDEFERHAEGTFTSDVSSTLEGQAALEFIAWLVKGRGGGSPAGSPTSTEEGTSESATPESGPGTSTEPSEGSAPGSPAGSPTSTEEGTSTEPSEGSAPGTSTEPSEGSAPGTSESATPESGPGSEPATSGSETPGSEPATSGSETPGSPAGSPTSTEEGTSESATPESGPGTSTEPSEGSAPGTSTEPSEGSAPGSPAGSPTSTEEGTSTEPSEGSAPGTSTEPSEGSAPGTSESATPESGPGTSTEPSEGSAPGTSESATPESGPGSEPATSGSETPGTSTEPSEGSAPGTSTEPSEGSAPGTSESATPESGPGTSESATPESGPGSPAGSPTSTEEGTSESATPESGPGSEPATSGSETPGTSESATPESGPGTSTEPSEGSAPGTSTEPSEGSAPGTSTEPSEGSAPGTSTEPSEGSAPGTSTEPSEGSAPGTSTEPSEGSAPGSPAGSPTSTEEGTSTEPSEGSAPGTSESATPESGPGSEPATSGSETPGTSESATPESGPGSEPATSGSETPGTSESATPESGPGTSTEPSEGSAPGTSESATPESGPGSPAGSPTSTEEGSPAGSPTSTEEGSPAGSPTSTEEGTSESATPESGPGTSTEPSEGSAP

SEQ ID NO: 1258 - protein, 614 aa, Artificial Sequence
  Description of Artificial Sequence: Synthetic polypeptide
HDEFERHAEGTFTSDVSSTLEGQAALEFIAWLVKGRGGGSTSSTAESPGPGSTSSTAESPGPGSTSESPSGTAPGSTSSTAESPGPGSTSSTAESPGPGTSTPESGSASPGSTSESPSGTAPGTSPSGESSTAPGSTSESPSGTAPGSTSESPSGTAPGTSPSGESSTAPGSTSESPSGTAPGSTSESPSGTAPGTSPSGESSTAPGSTSESPSGTAPGSTSESPSGTAPGSTSESPSGTAPGTSTPESGSASPGSTSESPSGTAPGTSTPESGSASPGSTSSTAESPGPGSTSSTAESPGPGTSTPESGSASPGTSTPESGSASPGSTSESPSGTAPGTSTPESGSASPGTSTPESGSASPGSTSESPSGTAPGSTSESPSGTAPGSTSESPSGTAPGSTSSTAESPGPGTSTPESGSASPGTSTPESGSASPGSTSESPSGTAPGSTSESPSGTAPGTSTPESGSASPGSTSESPSGTAPGSTSESPSGTAPGTSTPESGSASPGTSPSGESSTAPGSTSSTAESPGPGTSPSGESSTAPGSTSSTAESPGPGTSTPESGSASPGSTSESPSGTAPGSTSSTAESPGPGTSTPESGSASPGTSTPESGSASP

SEQ ID NO: 1259 - protein, 874 aa, Artificial Sequence
  Description of Artificial Sequence: Synthetic polypeptide
HDEFERHAEGTFTSDVSSTLEGQAALEFIAWLVKGRGGGSSESGSSEGGPGSSESGSSEGGPGESPGGSSGSESGSGGEPSESGSSGESPGGSSGSESGESPGGSSGSESGSSESGSSEGGPGSSESGSSEGGPGSSESGSSEGGPGESPGGSSGSESGESPGGSSGSESGESPGGSSGSESGSSESGSSEGGPGSSESGSSEGGPGSSESGSSEGGPGSSESGSSEGGPGSSESGSSEGGPGSSESGSSEGGPGSGGEPSESGSSGESPGGSSGSESGESPGGSSGSESGSGGEPSESGSSGSEGSSGPGESSGSSESGSSEGGPGSGGEPSESGSSGSEGSSGPGESSGSSESGSSEGGPGSGGEPSESGSSGESPGGSSGSESGSGGEPSESGSSGSGGEPSESGSSGSSESGSSEGGPGSGGEPSESGSSGSGGEPSESGSSGSEGSSGPGESSGESPGGSSGSESGSEGSSGPGESSGSEGSSGPGESSGSGGEPSESGSSGSSESGSSEGGPGSSESGSSEGGPGESPGGSSGSESGSGGEPSESGSSGSEGSSGPGESSGESPGGSSGSESGSEGSSGPGSSESGSSEGGPGSGGEPSESGSSGSEGSSGPGESSGSEGSSGPGESSGSEGSSGPGESSGSGGEPSESGSSGSGGEPSESGSSGESPGGSSGSESGESPGGSSGSESGSGGEPSESGSSGSEGSSGPGESSGESPGGSSGSESGSSESGSSEGGPGSSESGSSEGGPGSSESGSSEGGPGSGGEPSESGSSGSSESGSSEGGPGESPGGSSGSESGSGGEPSESGSSGSSESGSSEGGPGESPGGSSGSESGSGGEPSESGSSGESPGGSSGSESGSGGEPSESGSS

SEQ ID NO: 1260 - protein, 902 aa, Artificial Sequence
  Description of Artificial Sequence: Synthetic polypeptide
HDEFERHAEGTFTSDVSSTLEGQAALEFIAWLVKGRGGGSPAGSPTSTEEGTSESATPESGPGTSTEPSEGSAPGSPAGSPTSTEEGTSTEPSEGSAPGTSTEPSEGSAPGTSESATPESGPGSEPATSGSETPGSEPATSGSETPGSPAGSPTSTEEGTSESATPESGPGTSTEPSEGSAPGTSTEPSEGSAPGSPAGSPTSTEEGTSTEPSEGSAPGTSTEPSEGSAPGTSESATPESGPGTSTEPSEGSAPGTSESATPESGPGSEPATSGSETPGTSTEPSEGSAPGTSTEPSEGSAPGTSESATPESGPGTSESATPESGPGSPAGSPTSTEEGTSESATPESGPGSEPATSGSETPGTSESATPESGPGTSTEPSEGSAPGTSTEPSEGSAPGTSTEPSEGSAPGTSTEPSEGSAPGTSTEPSEGSAPGTSTEPSEGSAPGSPAGSPTSTEEGTSTEPSEGSAPGTSESATPESGPGSEPATSGSETPGTSESATPESGPGSEPATSGSETPGTSESATPESGPGTSTEPSEGSAPGTSESATPESGPGSPAGSPTSTEEGSPAGSPTSTEEGSPAGSPTSTEEGTSESATPESGPGTSTEPSEGSAPGTSESATPESGPGSEPATSGSETPGTSESATPESGPGSEPATSGSETPGTSESATPESGPGTSTEPSEGSAPGSPAGSPTSTEEGTSESATPESGPGSEPATSGSETPGTSESATPESGPGSPAGSPTSTEEGSPAGSPTSTEEGTSTEPSEGSAPGTSESATPESGPGTSESATPESGPGTSESATPESGPGSEPATSGSETPGSEPATSGSETPGSPAGSPTSTEEGTSTEPSEGSAPGTSTEPSEGSAPGSEPATSGSETPGTSESATPESGPGTSTEPSEGSAP

SEQ ID NO: 1261 - protein, 913 aa, Artificial Sequence
  Description of Artificial Sequence: Synthetic polypeptide
  MOD_RES (468)..(470): Any amino acid
  MOD_RES (481)..(484): Any amino acid
HDEFERHAEGTFTSDVSSTLEGQAALEFIAWLVKGRGGGSTSESPSGTAPGTSPSGESSTAPGSTSESPSGTAPGSTSESPSGTAPGTSTPESGSASPGTSTPESGSASPGSTSESPSGTAPGSTSESPSGTAPGTSPSGESSTAPGSTSESPSGTAPGTSPSGESSTAPGTSPSGESSTAPGSTSSTAESPGPGTSPSGESSTAPGTSPSGESSTAPGSTSSTAESPGPGTSTPESGSASPGTSTPESGSASPGSTSESPSGTAPGSTSESPSGTAPGTSTPESGSASPGSTSSTAESPGPGTSTPESGSASPGSTSESPSGTAPGTSPSGESSTAPGSTSSTAESPGPGTSPSGESSTAPGTSTPESGSASPGSTSSTAESPGPGSTSSTAESPGPGSTSSTAESPGPGSTSSTAESPGPGTSPSGESSTAPGSTSESPSGTAPGSTSESPSGTAPGTSTPESGPXXXGASASGAPSTXXXXSESPSGTAPGSTSESPSGTAPGSTSESPSGTAPGSTSESPSGTAPGSTSESPSGTAPGSTSESPSGTAPGTSTPESGSASPGTSPSGESSTAPGTSPSGESSTAPGSTSSTAESPGPGTSPSGESSTAPGTSTPESGSASPGSTSESPSGTAPGSTSESPSGTAPGTSPSGESSTAPGSTSESPSGTAPGTSTPESGSASPGTSTPESGSASPGSTSESPSGTAPGTSTPESGSASPGSTSSTAESPGPGSTSESPSGTAPGSTSESPSGTAPGTSPSGESSTAPGSTSSTAESPGPGTSPSGESSTAPGTSTPESGSASPGTSPSGESSTAPGTSPSGESSTAPGTSPSGESSTAPGSTSSTAESPGPGSTSSTAESPGPGTSPSGESSTAPGSSPSASTGTGPGSSTPSGATGSPGSSTPSGATGSP

SEQ ID NO: 1262 - protein, 902 aa, Artificial Sequence
  Description of Artificial Sequence: Synthetic polypeptide
HDEFERHAEGTFTSDVSSTLEGQAALEFIAWLVKGRGGGASPGTSSTGSPGSSPSASTGTGPGSSPSASTGTGPGTPGSGTASSSPGSSTPSGATGSPGSNPSASTGTGPGASPGTSSTGSPGTPGSGTASSSPGSSTPSGATGSPGTPGSGTASSSPGASPGTSSTGSPGASPGTSSTGSPGTPGSGTASSSPGSSTPSGATGSPGASPGTSSTGSPGTPGSGTASSSPGSSTPSGATGSPGSNPSASTGTGPGSSPSASTGTGPGSSTPSGATGSPGSSTPSGATGSPGASPGTSSTGSPGASPGTSSTGSPGASPGTSSTGSPGTPGSGTASSSPGASPGTSSTGSPGASPGTSSTGSPGASPGTSSTGSPGSSPSASTGTGPGTPGSGTASSSPGASPGTSSTGSPGASPGTSSTGSPGASPGTSSTGSPGSSTPSGATGSPGSSTPSGATGSPGASPGTSSTGSPGTPGSGTASSSPGSSTPSGATGSPGSSTPSGATGSPGSSTPSGATGSPGSSPSASTGTGPGASPGTSSTGSPGASPGTSSTGSPGTPGSGTASSSPGASPGTSSTGSPGASPGTSSTGSPGASPGTSSTGSPGASPGTSSTGSPGTPGSGTASSSPGSSTPSGATGSPGTPGSGTASSSPGSSTPSGATGSPGTPGSGTASSSPGSSTPSGATGSPGSSTPSGATGSPGSSPSASTGTGPGSSPSASTGTGPGASPGTSSTGSPGTPGSGTASSSPGSSTPSGATGSPGSSPSASTGTGPGSSPSASTGTGPGASPGTSSTGSPGASPGTSSTGSPGSSTPSGATGSPGSSPSASTGTGPGASPGTSSTGSPGSSPSASTGTGPGTPGSGTASSSPGSSTPSGATGSPGSSTPSGATGSPGASPGTSSTGSP

SEQ ID NO: 1263 - protein, 913 aa, Artificial Sequence
  Description of Artificial Sequence: Synthetic polypeptide
HDEFERHAEGTFTSDVSSTLEGQAALEFIAWLVKGRGGGTSTEPSEGSAPGSEPATSGSETPGSPAGSPTSTEEGSTSSTAESPGPGTSTPESGSASPGSTSESPSGTAPGSTSESPSGTAPGTSTPESGSASPGTSTPESGSASPGSEPATSGSETPGTSESATPESGPGSPAGSPTSTEEGTSTEPSEGSAPGTSESATPESGPGTSTEPSEGSAPGTSTEPSEGSAPGSPAGSPTSTEEGTSTEPSEGSAPGTSTEPSEGSAPGTSESATPESGPGTSESATPESGPGTSTEPSEGSAPGTSTEPSEGSAPGTSESATPESGPGTSTEPSEGSAPGSEPATSGSETPGSPAGSPTSTEEGSSTPSGATGSPGTPGSGTASSSPGSSTPSGATGSPGTSTEPSEGSAPGTSTEPSEGSAPGSEPATSGSETPGSPAGSPTSTEEGSPAGSPTSTEEGTSTEPSEGSAPGASASGAPSTGGTSESATPESGPGSPAGSPTSTEEGSPAGSPTSTEEGSTSSTAESPGPGSTSESPSGTAPGTSPSGESSTAPGTPGSGTASSSPGSSTPSGATGSPGSSPSASTGTGPGSEPATSGSETPGTSESATPESGPGSEPATSGSETPGSTSSTAESPGPGSTSSTAESPGPGTSPSGESSTAPGSEPATSGSETPGSEPATSGSETPGTSTEPSEGSAPGSTSSTAESPGPGTSTPESGSASPGSTSESPSGTAPGTSTEPSEGSAPGTSTEPSEGSAPGTSTEPSEGSAPGSSTPSGATGSPGSSPSASTGTGPGASPGTSSTGSPGSEPATSGSETPGTSESATPESGPGSPAGSPTSTEEGSSTPSGATGSPGSSPSASTGTGPGASPGTSSTGSPGTSESATPESGPGTSTEPSEGSAPGTSTEPSEGSAP

SEQ ID NO: 1264 - protein, 1356 aa, Artificial Sequence
  Description of Artificial Sequence: Synthetic polypeptide
HDEFERHAEGTFTSDVSSTLEGQAALEFIAWLVKGRGGGTSTEPSEGSAPGSEPATSGSETPGSPAGSPTSTEEGSTSSTAESPGPGTSTPESGSASPGSTSESPSGTAPGSTSESPSGTAPGTSTPESGSASPGTSTPESGSASPGSEPATSGSETPGTSESATPESGPGSPAGSPTSTEEGTSTEPSEGSAPGTSESATPESGPGTSTEPSEGSAPGTSTEPSEGSAPGSPAGSPTSTEEGTSTEPSEGSAPGTSTEPSEGSAPGTSESATPESGPGTSESATPESGPGTSTEPSEGSAPGTSTEPSEGSAPGTSESATPESGPGTSTEPSEGSAPGSEPATSGSETPGSPAGSPTSTEEGSSTPSGATGSPGTPGSGTASSSPGSSTPSGATGSPGTSTEPSEGSAPGTSTEPSEGSAPGSEPATSGSETPGSPAGSPTSTEEGSPAGSPTSTEEGTSTEPSEGSAPGPEPTGPAPSGGSEPATSGSETPGTSESATPESGPGSPAGSPTSTEEGTSESATPESGPGSPAGSPTSTEEGSPAGSPTSTEEGTSESATPESGPGSPAGSPTSTEEGSPAGSPTSTEEGSTSSTAESPGPGSTSESPSGTAPGTSPSGESSTAPGSTSESPSGTAPGSTSESPSGTAPGTSPSGESSTAPGTSTEPSEGSAPGTSESATPESGPGTSESATPESGPGSEPATSGSETPGTSESATPESGPGTSESATPESGPGTSTEPSEGSAPGTSESATPESGPGTSTEPSEGSAPGTSPSGESSTAPGTSPSGESSTAPGTSPSGESSTAPGTSTEPSEGSAPGSPAGSPTSTEEGTSTEPSEGSAPGSSPSASTGTGPGSSTPSGATGSPGSSTPSGATGSPGSSTPSGATGSPGSSTPSGATGSPGASPGTSSTGSPGASASGAPSTGGTSPSGESSTAPGSTSSTAESPGPGTSPSGESSTAPGTSESATPESGPGTSTEPSEGSAPGTSTEPSEGSAPGSSPSASTGTGPGSSTPSGATGSPGASPGTSSTGSPGTSTPESGSASPGTSPSGESSTAPGTSPSGESSTAPGTSESATPESGPGSEPATSGSETPGTSTEPSEGSAPGSTSESPSGTAPGSTSESPSGTAPGTSTPESGSASPGSPAGSPTSTEEGTSESATPESGPGTSTEPSEGSAPGSPAGSPTSTEEGTSESATPESGPGSEPATSGSETPGSSTPSGATGSPGASPGTSSTGSPGSSTPSGATGSPGSTSESPSGTAPGTSPSGESSTAPGSTSSTAESPGPGSSTPSGATGSPGASPGTSSTGSPGTPGSGTASSSPGSPAGSPTSTEEGSPAGSPTSTEEGTSTEPSEGSAP

SEQ ID NO: 1265 - protein, 951 aa, Artificial Sequence
  Description of Artificial Sequence: Synthetic polypeptide
MAEPAGSPTSTEEGTPGSGTASSSPGSSTPSGATGSPGASPGTSSTGSPGSPAGSPTSTEEGTSESATPESGPGTSTEPSEGSAPGSPAGSPTSTEEGTSTEPSEGSAPGTSTEPSEGSAPGTSESATPESGPGSEPATSGSETPGSEPATSGSETPGSPAGSPTSTEEGTSESATPESGPGTSTEPSEGSAPGTSTEPSEGSAPGSPAGSPTSTEEGTSTEPSEGSAPGTSTEPSEGSAPGTSESATPESGPGTSTEPSEGSAPGTSESATPESGPGSEPATSGSETPGTSTEPSEGSAPGTSTEPSEGSAPGTSESATPESGPGTSESATPESGPGSPAGSPTSTEEGTSESATPESGPGSEPATSGSETPGTSESATPESGPGTSTEPSEGSAPGTSTEPSEGSAPGTSTEPSEGSAPGTSTEPSEGSAPGTSTEPSEGSAPGTSTEPSEGSAPGSPAGSPTSTEEGTSTEPSEGSAPGTSESATPESGPGSEPATSGSETPGTSESATPESGPGSEPATSGSETPGTSESATPESGPGTSTEPSEGSAPGTSESATPESGPGSPAGSPTSTEEGSPAGSPTSTEEGSPAGSPTSTEEGTSESATPESGPGTSTEPSEGSAPGTSESATPESGPGSEPATSGSETPGTSESATPESGPGSEPATSGSETPGTSESATPESGPGTSTEPSEGSAPGSPAGSPTSTEEGTSESATPESGPGSEPATSGSETPGTSESATPESGPGSPAGSPTSTEEGSPAGSPTSTEEGTSTEPSEGSAPGTSESATPESGPGTSESATPESGPGTSESATPESGPGSEPATSGSETPGSEPATSGSETPGSPAGSPTSTEEGTSTEPSEGSAPGTSTEPSEGSAPGSEPATSGSETPGTSESATPESGPGTSTEPSEGSAPGHDEFERHAEGTFTSDVSSTLEGQAALEFIAWLVKGRG

SEQ ID NO: 1266 - protein, 962 aa, Artificial Sequence
  Description of Artificial Sequence: Synthetic polypeptide
MAEPAGSPTSTEEGASPGTSSTGSPGSSTPSGATGSPGSSTPSGATGSPGTSTEPSEGSAPGSEPATSGSETPGSPAGSPTSTEEGSTSSTAESPGPGTSTPESGSASPGSTSESPSGTAPGSTSESPSGTAPGTSTPESGSASPGTSTPESGSASPGSEPATSGSETPGTSESATPESGPGSPAGSPTSTEEGTSTEPSEGSAPGTSESATPESGPGTSTEPSEGSAPGTSTEPSEGSAPGSPAGSPTSTEEGTSTEPSEGSAPGTSTEPSEGSAPGTSESATPESGPGTSESATPESGPGTSTEPSEGSAPGTSTEPSEGSAPGTSESATPESGPGTSTEPSEGSAPGSEPATSGSETPGSPAGSPTSTEEGSSTPSGATGSPGTPGSGTASSSPGSSTPSGATGSPGTSTEPSEGSAPGTSTEPSEGSAPGSEPATSGSETPGSPAGSPTSTEEGSPAGSPTSTEEGTSTEPSEGSAPGASASGAPSTGGTSESATPESGPGSPAGSPTSTEEGSPAGSPTSTEEGSTSSTAESPGPGSTSESPSGTAPGTSPSGESSTAPGTPGSGTASSSPGSSTPSGATGSPGSSPSASTGTGPGSEPATSGSETPGTSESATPESGPGSEPATSGSETPGSTSSTAESPGPGSTSSTAESPGPGTSPSGESSTAPGSEPATSGSETPGSEPATSGSETPGTSTEPSEGSAPGSTSSTAESPGPGTSTPESGSASPGSTSESPSGTAPGTSTEPSEGSAPGTSTEPSEGSAPGTSTEPSEGSAPGSSTPSGATGSPGSSPSASTGTGPGASPGTSSTGSPGSEPATSGSETPGTSESATPESGPGSPAGSPTSTEEGSSTPSGATGSPGSSPSASTGTGPGASPGTSSTGSPGTSESATPESGPGTSTEPSEGSAPGTSTEPSEGSAPGHDEFERHAEGTFTSDVSSTLEGQAALEFIAWLVKGRG

SEQ ID NO: 1267 - protein, 182 aa, Artificial Sequence
  Description of Artificial Sequence: Synthetic polypeptide
GSEPATSGSETPGTSESATPESGPGSEPATSGSETPGSPAGSPTSTEEGTSTEPSEGSAPGSEPATSGSETPGSEPATSGSETPGSEPATSGSETPGTSTEPSEGSAPGTSESATPESGPGSEPATSGSETPGTSTEPSEGSAPGHDEFERHAEGTFTSDVSSTLEGQAALEFIAWLVKGRG

SEQ ID NO: 1268 - protein, 182 aa, Artificial Sequence
  Description of Artificial Sequence: Synthetic polypeptide
GTSTPESGSASPGTSPSGESSTAPGTSPSGESSTAPGSTSSTAESPGPGSTSESPSGTAPGSTSSTAESPGPGTSPSGESSTAPGTSTPESGSASPGSTSSTAESPGPGTSPSGESSTAPGTSPSGESSTAPGTSPSGESSTAPGHDEFERHAEGTFTSDVSSTLEGQAALEFIAWLVKGRG

SEQ ID NO: 1269 - protein, 326 aa, Artificial Sequence
  Description of Artificial Sequence: Synthetic polypeptide
GTSESATPESGPGSEPATSGSETPGTSESATPESGPGSEPATSGSETPGTSESATPESGPGTSTEPSEGSAPGSPAGSPTSTEEGTSESATPESGPGSEPATSGSETPGTSESATPESGPGSPAGSPTSTEEGSPAGSPTSTEEGTSTEPSEGSAPGTSESATPESGPGTSESATPESGPGTSESATPESGPGSEPATSGSETPGSEPATSGSETPGSPAGSPTSTEEGTSTEPSEGSAPGTSTEPSEGSAPGSEPATSGSETPGTSESATPESGPGTSTEPSEGSAPGHDEFERHAEGTFTSDVSSTLEGQAALEFIAWLVKGRG

SEQ ID NO: 1270 - protein, 614 aa, Artificial Sequence
  Description of Artificial Sequence: Synthetic polypeptide
GSPAGSPTSTEEGTSESATPESGPGTSTEPSEGSAPGSPAGSPTSTEEGTSTEPSEGSAPGTSTEPSEGSAPGTSESATPESGPGSEPATSGSETPGSEPATSGSETPGSPAGSPTSTEEGTSESATPESGPGTSTEPSEGSAPGTSTEPSEGSAPGSPAGSPTSTEEGTSTEPSEGSAPGTSTEPSEGSAPGTSESATPESGPGTSTEPSEGSAPGTSESATPESGPGSEPATSGSETPGTSTEPSEGSAPGTSTEPSEGSAPGTSESATPESGPGTSESATPESGPGSPAGSPTSTEEGTSESATPESGPGSEPATSGSETPGTSESATPESGPGTSTEPSEGSAPGTSTEPSEGSAPGTSTEPSEGSAPGTSTEPSEGSAPGTSTEPSEGSAPGTSTEPSEGSAPGSPAGSPTSTEEGTSTEPSEGSAPGTSESATPESGPGSEPATSGSETPGTSESATPESGPGSEPATSGSETPGTSESATPESGPGTSTEPSEGSAPGTSESATPESGPGSPAGSPTSTEEGSPAGSPTSTEEGSPAGSPTSTEEGTSESATPESGPGTSTEPSEGSAPGHDEFERHAEGTFTSDVSSTLEGQAALEFIAWLVKGRG

SEQ ID NO: 1271 - protein, 614 aa, Artificial Sequence
  Description of Artificial Sequence: Synthetic polypeptide
GSTSSTAESPGPGSTSSTAESPGPGSTSESPSGTAPGSTSSTAESPGPGSTSSTAESPGPGTSTPESGSASPGSTSESPSGTAPGTSPSGESSTAPGSTSESPSGTAPGSTSESPSGTAPGTSPSGESSTAPGSTSESPSGTAPGSTSESPSGTAPGTSPSGESSTAPGSTSESPSGTAPGSTSESPSGTAPGSTSESPSGTAPGTSTPESGSASPGSTSESPSGTAPGTSTPESGSASPGSTSSTAESPGPGSTSSTAESPGPGTSTPESGSASPGTSTPESGSASPGSTSESPSGTAPGTSTPESGSASPGTSTPESGSASPGSTSESPSGTAPGSTSESPSGTAPGSTSESPSGTAPGSTSSTAESPGPGTSTPESGSASPGTSTPESGSASPGSTSESPSGTAPGSTSESPSGTAPGTSTPESGSASPGSTSESPSGTAPGSTSESPSGTAPGTSTPESGSASPGTSPSGESSTAPGSTSSTAESPGPGTSPSGESSTAPGSTSSTAESPGPGTSTPESGSASPGSTSESPSGTAPGSTSSTAESPGPGTSTPESGSASPGTSTPESGSASPGHDEFERHAEGTFTSDVSSTLEGQAALEFIAWLVKGRG

SEQ ID NO: 1272 - protein, 874 aa, Artificial Sequence
  Description of Artificial Sequence: Synthetic polypeptide
GSSESGSSEGGPGSSESGSSEGGPGESPGGSSGSESGSGGEPSESGSSGESPGGSSGSESGESPGGSSGSESGSSESGSSEGGPGSSESGSSEGGPGSSESGSSEGGPGESPGGSSGSESGESPGGSSGSESGESPGGSSGSESGSSESGSSEGGPGSSESGSSEGGPGSSESGSSEGGPGSSESGSSEGGPGSSESGSSEGGPGSSESGSSEGGPGSGGEPSESGSSGESPGGSSGSESGESPGGSSGSESGSGGEPSESGSSGSEGSSGPGESSGSSESGSSEGGPGSGGEPSESGSSGSEGSSGPGESSGSSESGSSEGGPGSGGEPSESGSSGESPGGSSGSESGSGGEPSESGSSGSGGEPSESGSSGSSESGSSEGGPGSGGEPSESGSSGSGGEPSESGSSGSEGSSGPGESSGESPGGSSGSESGSEGSSGPGESSGSEGSSGPGESSGSGGEPSESGSSGSSESGSSEGGPGSSESGSSEGGPGESPGGSSGSESGSGGEPSESGSSGSEGSSGPGESSGESPGGSSGSESGSEGSSGPGSSESGSSEGGPGSGGEPSESGSSGSEGSSGPGESSGSEGSSGPGESSGSEGSSGPGESSGSGGEPSESGSSGSGGEPSESGSSGESPGGSSGSESGESPGGSSGSESGSGGEPSESGSSGSEGSSGPGESSGESPGGSSGSESGSSESGSSEGGPGSSESGSSEGGPGSSESGSSEGGPGSGGEPSESGSSGSSESGSSEGGPGESPGGSSGSESGSGGEPSESGSSGSSESGSSEGGPGESPGGSSGSESGSGGEPSESGSSGESPGGSSGSESGSGGEPSESGSSGHDEFERHAEGTFTSDVSSTLEGQAALEFIAWLVKGRG

SEQ ID NO: 1273 - protein, 902 aa, Artificial Sequence
  Description of Artificial Sequence: Synthetic polypeptide
GSPAGSPTSTEEGTSESATPESGPGTSTEPSEGSAPGSPAGSPTSTEEGTSTEPSEGSAPGTSTEPSEGSAPGTSESATPESGPGSEPATSGSETPGSEPATSGSETPGSPAGSPTSTEEGTSESATPESGPGTSTEPSEGSAPGTSTEPSEGSAPGSPAGSPTSTEEGTSTEPSEGSAPGTSTEPSEGSAPGTSESATPESGPGTSTEPSEGSAPGTSESATPESGPGSEPATSGSETPGTSTEPSEGSAPGTSTEPSEGSAPGTSESATPESGPGTSESATPESGPGSPAGSPTSTEEGTSESATPESGPGSEPATSGSETPGTSESATPESGPGTSTEPSEGSAPGTSTEPSEGSAPGTSTEPSEGSAPGTSTEPSEGSAPGTSTEPSEGSAPGTSTEPSEGSAPGSPAGSPTSTEEGTSTEPSEGSAPGTSESATPESGPGSEPATSGSETPGTSESATPESGPGSEPATSGSETPGTSESATPESGPGTSTEPSEGSAPGTSESATPESGPGSPAGSPTSTEEGSPAGSPTSTEEGSPAGSPTSTEEGTSESATPESGPGTSTEPSEGSAPGTSESATPESGPGSEPATSGSETPGTSESATPESGPGSEPATSGSETPGTSESATPESGPGTSTEPSEGSAPGSPAGSPTSTEEGTSESATPESGPGSEPATSGSETPGTSESATPESGPGSPAGSPTSTEEGSPAGSPTSTEEGTSTEPSEGSAPGTSESATPESGPGTSESATPESGPGTSESATPESGPGSEPATSGSETPGSEPATSGSETPGSPAGSPTSTEEGTSTEPSEGSAPGTSTEPSEGSAPGSEPATSGSETPGTSESATPESGPGTSTEPSEGSAPGHDEFERHAEGTFTSDVSSTLEGQAALEFIAWLVKGRG

SEQ ID NO: 1274 - protein, 913 aa, Artificial Sequence
  Description of Artificial Sequence: Synthetic polypeptide
  MOD_RES (430)..(432): Any amino acid
  MOD_RES (443)..(446): Any amino acid
GSTSESPSGTAPGTSPSGESSTAPGSTSESPSGTAPGSTSESPSGTAPGTSTPESGSASPGTSTPESGSASPGSTSESPSGTAPGSTSESPSGTAPGTSPSGESSTAPGSTSESPSGTAPGTSPSGESSTAPGTSPSGESSTAPGSTSSTAESPGPGTSPSGESSTAPGTSPSGESSTAPGSTSSTAESPGPGTSTPESGSASPGTSTPESGSASPGSTSESPSGTAPGSTSESPSGTAPGTSTPESGSASPGSTSSTAESPGPGTSTPESGSASPGSTSESPSGTAPGTSPSGESSTAPGSTSSTAESPGPGTSPSGESSTAPGTSTPESGSASPGSTSSTAESPGPGSTSSTAESPGPGSTSSTAESPGPGSTSSTAESPGPGTSPSGESSTAPGSTSESPSGTAPGSTSESPSGTAPGTSTPESGPXXXGASASGAPSTXXXXSESPSGTAPGSTSESPSGTAPGSTSESPSGTAPGSTSESPSGTAPGSTSESPSGTAPGSTSESPSGTAPGTSTPESGSASPGTSPSGESSTAPGTSPSGESSTAPGSTSSTAESPGPGTSPSGESSTAPGTSTPESGSASPGSTSESPSGTAPGSTSESPSGTAPGTSPSGESSTAPGSTSESPSGTAPGTSTPESGSASPGTSTPESGSASPGSTSESPSGTAPGTSTPESGSASPGSTSSTAESPGPGSTSESPSGTAPGSTSESPSGTAPGTSPSGESSTAPGSTSSTAESPGPGTSPSGESSTAPGTSTPESGSASPGTSPSGESSTAPGTSPSGESSTAPGTSPSGESSTAPGSTSSTAESPGPGSTSSTAESPGPGTSPSGESSTAPGSSPSASTGTGPGSSTPSGATGSPGSSTPSGATGSPGHDEFERHAEGTFTSDVSSTLEGQAALEFIAWLVKGRG

SEQ ID NO: 1275 - protein, 902 aa, Artificial Sequence
  Description of Artificial Sequence: Synthetic polypeptide
GASPGTSSTGSPGSSPSASTGTGPGSSPSASTGTGPGTPGSGTASSSPGSSTPSGATGSPGSNPSASTGTGPGASPGTSSTGSPGTPGSGTASSSPGSSTPSGATGSPGTPGSGTASSSPGASPGTSSTGSPGASPGTSSTGSPGTPGSGTASSSPGSSTPSGATGSPGASPGTSSTGSPGTPGSGTASSSPGSSTPSGATGSPGSNPSASTGTGPGSSPSASTGTGPGSSTPSGATGSPGSSTPSGATGSPGASPGTSSTGSPGASPGTSSTGSPGASPGTSSTGSPGTPGSGTASSSPGASPGTSSTGSPGASPGTSSTGSPGASPGTSSTGSPGSSPSASTGTGPGTPGSGTASSSPGASPGTSSTGSPGASPGTSSTGSPGASPGTSSTGSPGSSTPSGATGSPGSSTPSGATGSPGASPGTSSTGSPGTPGSGTASSSPGSSTPSGATGSPGSSTPSGATGSPGSSTPSGATGSPGSSPSASTGTGPGASPGTSSTGSPGASPGTSSTGSPGTPGSGTASSSPGASPGTSSTGSPGASPGTSSTGSPGASPGTSSTGSPGASPGTSSTGSPGTPGSGTASSSPGSSTPSGATGSPGTPGSGTASSSPGSSTPSGATGSPGTPGSGTASSSPGSSTPSGATGSPGSSTPSGATGSPGSSPSASTGTGPGSSPSASTGTGPGASPGTSSTGSPGTPGSGTASSSPGSSTPSGATGSPGSSPSASTGTGPGSSPSASTGTGPGASPGTSSTGSPGASPGTSSTGSPGSSTPSGATGSPGSSPSASTGTGPGASPGTSSTGSPGSSPSASTGTGPGTPGSGTASSSPGSSTPSGATGSPGSSTPSGATGSPGASPGTSSTGSPGHDEFERHAEGTFTSDVSSTLEGQAALEFIAWLVKGRG

SEQ ID NO: 1276 - protein, 913 aa, Artificial Sequence
  Description of Artificial Sequence: Synthetic polypeptide
GTSTEPSEGSAPGSEPATSGSETPGSPAGSPTSTEEGSTSSTAESPGPGTSTPESGSASPGSTSESPSGTAPGSTSESPSGTAPGTSTPESGSASPGTSTPESGSASPGSEPATSGSETPGTSESATPESGPGSPAGSPTSTEEGTSTEPSEGSAPGTSESATPESGPGTSTEPSEGSAPGTSTEPSEGSAPGSPAGSPTSTEEGTSTEPSEGSAPGTSTEPSEGSAPGTSESATPESGPGTSESATPESGPGTSTEPSEGSAPGTSTEPSEGSAPGTSESATPESGPGTSTEPSEGSAPGSEPATSGSETPGSPAGSPTSTEEGSSTPSGATGSPGTPGSGTASSSPGSSTPSGATGSPGTSTEPSEGSAPGTSTEPSEGSAPGSEPATSGSETPGSPAGSPTSTEEGSPAGSPTSTEEGTSTEPSEGSAPGASASGAPSTGGTSESATPESGPGSPAGSPTSTEEGSPAGSPTSTEEGSTSSTAESPGPGSTSESPSGTAPGTSPSGESSTAPGTPGSGTASSSPGSSTPSGATGSPGSSPSASTGTGPGSEPATSGSETPGTSESATPESGPGSEPATSGSETPGSTSSTAESPGPGSTSSTAESPGPGTSPSGESSTAPGSEPATSGSETPGSEPATSGSETPGTSTEPSEGSAPGSTSSTAESPGPGTSTPESGSASPGSTSESPSGTAPGTSTEPSEGSAPGTSTEPSEGSAPGTSTEPSEGSAPGSSTPSGATGSPGSSPSASTGTGPGASPGTSSTGSPGSEPATSGSETPGTSESATPESGPGSPAGSPTSTEEGSSTPSGATGSPGSSPSASTGTGPGASPGTSSTGSPGTSESATPESGPGTSTEPSEGSAPGTSTEPSEGSAPGHDEFERHAEGTFTSDVSSTLEGQAALEFIAWLVKGRG

SEQ ID NO: 1277 - protein, 1356 aa, Artificial Sequence
  Description of Artificial Sequence: Synthetic polypeptide
GTSTEPSEGSAPGSEPATSGSETPGSPAGSPTSTEEGSTSSTAESPGPGTSTPESGSASPGSTSESPSGTAPGSTSESPSGTAPGTSTPESGSASPGTSTPESGSASPGSEPATSGSETPGTSESATPESGPGSPAGSPTSTEEGTSTEPSEGSAPGTSESATPESGPGTSTEPSEGSAPGTSTEPSEGSAPGSPAGSPTSTEEGTSTEPSEGSAPGTSTEPSEGSAPGTSESATPESGPGTSESATPESGPGTSTEPSEGSAPGTSTEPSEGSAPGTSESATPESGPGTSTEPSEGSAPGSEPATSGSETPGSPAGSPTSTEEGSSTPSGATGSPGTPGSGTASSSPGSSTPSGATGSPGTSTEPSEGSAPGTSTEPSEGSAPGSEPATSGSETPGSPAGSPTSTEEGSPAGSPTSTEEGTSTEPSEGSAPGPEPTGPAPSGGSEPATSGSETPGTSESATPESGPGSPAGSPTSTEEGTSESATPESGPGSPAGSPTSTEEGSPAGSPTSTEEGTSESATPESGPGSPAGSPTSTEEGSPAGSPTSTEEGSTSSTAESPGPGSTSESPSGTAPGTSPSGESSTAPGSTSESPSGTAPGSTSESPSGTAPGTSPSGESSTAPGTSTEPSEGSAPGTSESATPESGPGTSESATPESGPGSEPATSGSETPGTSESATPESGPGTSESATPESGPGTSTEPSEGSAPGTSESATPESGPGTSTEPSEGSAPGTSPSGESSTAPGTSPSGESSTAPGTSPSGESSTAPGTSTEPSEGSAPGSPAGSPTSTEEGTSTEPSEGSAPGSSPSASTGTGPGSSTPSGATGSPGSSTPSGATGSPGSSTPSGATGSPGSSTPSGATGSPGASPGTSSTGSPGASASGAPSTGGTSPSGESSTAPGSTSSTAESPGPGTSPSGESSTAPGTSESATPESGPGTSTEPSEGSAPGTSTEPSEGSAPGSSPSASTGTGPGSSTPSGATGSPGASPGTSSTGSPGTSTPESGSASPGTSPSGESSTAPGTSPSGESSTAPGTSESATPESGPGSEPATSGSETPGTSTEPSEGSAPGSTSESPSGTAPGSTSESPSGTAPGTSTPESGSASPGSPAGSPTSTEEGTSESATPESGPGTSTEPSEGSAPGSPAGSPTSTEEGTSESATPESGPGSEPATSGSETPGSSTPSGATGSPGASPGTSSTGSPGSSTPSGATGSPGSTSESPSGTAPGTSPSGESSTAPGSTSSTAESPGPGSSTPSGATGSPGASPGTSSTGSPGTPGSGTASSSPGSPAGSPTSTEEGSPAGSPTSTEEGTSTEPSEGSAPGHDEFERHAEGTFTSDVSSTLEGQAALEFIAWLVKGRG

SEQ ID NO: 1278 - protein, 175 aa, Artificial Sequence
  Description of Artificial Sequence: Synthetic polypeptide
HAEGTFTSDVSSYLEGQAALEFIAWLVKGRGGSEPATSGSETPGTSESATPESGPGSEPATSGSETPGSPAGSPTSTEEGTSTEPSEGSAPGSEPATSGSETPGSEPATSGSETPGSEPATSGSETPGTSTEPSEGSAPGTSESATPESGPGSEPATSGSETPGTSTEPSEGSAP

SEQ ID NO: 1279 - protein, 175 aa, Artificial Sequence
  Description of Artificial Sequence: Synthetic polypeptide
HAEGTFTSDVSSYLEGQAALEFIAWLVKGRGGTSTPESGSASPGTSPSGESSTAPGTSPSGESSTAPGSTSSTAESPGPGSTSESPSGTAPGSTSSTAESPGPGTSPSGESSTAPGTSTPESGSASPGSTSSTAESPGPGTSPSGESSTAPGTSPSGESSTAPGTSPSGESSTAP

SEQ ID NO: 1280 - protein, 319 aa, Artificial Sequence
  Description of Artificial Sequence: Synthetic polypeptide
HAEGTFTSDVSSYLEGQAALEFIAWLVKGRGGTSESATPESGPGSEPATSGSETPGTSESATPESGPGSEPATSGSETPGTSESATPESGPGTSTEPSEGSAPGSPAGSPTSTEEGTSESATPESGPGSEPATSGSETPGTSESATPESGPGSPAGSPTSTEEGSPAGSPTSTEEGTSTEPSEGSAPGTSESATPESGPGTSESATPESGPGTSESATPESGPGSEPATSGSETPGSEPATSGSETPGSPAGSPTSTEEGTSTEPSEGSAPGTSTEPSEGSAPGSEPATSGSETPGTSESATPESGPGTSTEPSEGSAP

SEQ ID NO: 1281 - protein, 607 aa, Artificial Sequence
  Description of Artificial Sequence: Synthetic polypeptide
HAEGTFTSDVSSYLEGQAALEFIAWLVKGRGGSPAGSPTSTEEGTSESATPESGPGTSTEPSEGSAPGSPAGSPTSTEEGTSTEPSEGSAPGTSTEPSEGSAPGTSESATPESGPGSEPATSGSETPGSEPATSGSETPGSPAGSPTSTEEGTSESATPESGPGTSTEPSEGSAPGTSTEPSEGSAPGSPAGSPTSTEEGTSTEPSEGSAPGTSTEPSEGSAPGTSESATPESGPGTSTEPSEGSAPGTSESATPESGPGSEPATSGSETPGTSTEPSEGSAPGTSTEPSEGSAPGTSESATPESGPGTSESATPESGPGSPAGSPTSTEEGTSESATPESGPGSEPATSGSETPGTSESATPESGPGTSTEPSEGSAPGTSTEPSEGSAPGTSTEPSEGSAPGTSTEPSEGSAPGTSTEPSEGSAPGTSTEPSEGSAPGSPAGSPTSTEEGTSTEPSEGSAPGTSESATPESGPGSEPATSGSETPGTSESATPESGPGSEPATSGSETPGTSESATPESGPGTSTEPSEGSAPGTSESATPESGPGSPAGSPTSTEEGSPAGSPTSTEEGSPAGSPTSTEEGTSESATPESGPGTSTEPSEGSAP

SEQ ID NO: 1282 - protein, 607 aa, Artificial Sequence
  Description of Artificial Sequence: Synthetic polypeptide
HAEGTFTSDVSSYLEGQAALEFIAWLVKGRGGSTSSTAESPGPGSTSSTAESPGPGSTSESPSGTAPGSTSSTAESPGPGSTSSTAESPGPGTSTPESGSASPGSTSESPSGTAPGTSPSGESSTAPGSTSESPSGTAPGSTSESPSGTAPGTSPSGESSTAPGSTSESPSGTAPGSTSESPSGTAPGTSPSGESSTAPGSTSESPSGTAPGSTSESPSGTAPGSTSESPSGTAPGTSTPESGSASPGSTSESPSGTAPGTSTPESGSASPGSTSSTAESPGPGSTSSTAESPGPGTSTPESGSASPGTSTPESGSASPGSTSESPSGTAPGTSTPESGSASPGTSTPESGSASPGSTSESPSGTAPGSTSESPSGTAPGSTSESPSGTAPGSTSSTAESPGPGTSTPESGSASPGTSTPESGSASPGSTSESPSGTAPGSTSESPSGTAPGTSTPESGSASPGSTSESPSGTAPGSTSESPSGTAPGTSTPESGSASPGTSPSGESSTAPGSTSSTAESPGPGTSPSGESSTAPGSTSSTAESPGPGTSTPESGSASPGSTSESPSGTAPGSTSSTAESPGPGTSTPESGSASPGTSTPESGSASP

SEQ ID NO: 1283 - protein, 867 aa, Artificial Sequence
  Description of Artificial Sequence: Synthetic polypeptide
HAEGTFTSDVSSYLEGQAALEFIAWLVKGRGGSSESGSSEGGPGSSESGSSEGGPGESPGGSSGSESGSGGEPSESGSSGESPGGSSGSESGESPGGSSGSESGSSESGSSEGGPGSSESGSSEGGPGSSESGSSEGGPGESPGGSSGSESGESPGGSSGSESGESPGGSSGSESGSSESGSSEGGPGSSESGSSEGGPGSSESGSSEGGPGSSESGSSEGGPGSSESGSSEGGPGSSESGSSEGGPGSGGEPSESGSSGESPGGSSGSESGESPGGSSGSESGSGGEPSESGSSGSEGSSGPGESSGSSESGSSEGGPGSGGEPSESGSSGSEGSSGPGESSGSSESGSSEGGPGSGGEPSESGSSGESPGGSSGSESGSGGEPSESGSSGSGGEPSESGSSGSSESGSSEGGPGSGGEPSESGSSGSGGEPSESGSSGSEGSSGPGESSGESPGGSSGSESGSEGSSGPGESSGSEGSSGPGESSGSGGEPSESGSSGSSESGSSEGGPGSSESGSSEGGPGESPGGSSGSESGSGGEPSESGSSGSEGSSGPGESSGESPGGSSGSESGSEGSSGPGSSESGSSEGGPGSGGEPSESGSSGSEGSSGPGESSGSEGSSGPGESSGSEGSSGPGESSGSGGEPSESGSSGSGGEPSESGSSGESPGGSSGSESGESPGGSSGSESGSGGEPSESGSSGSEGSSGPGESSGESPGGSSGSESGSSESGSSEGGPGSSESGSSEGGPGSSESGSSEGGPGSGGEPSESGSSGSSESGSSEGGPGESPGGSSGSESGSGGEPSESGSSGSSESGSSEGGPGESPGGSSGSESGSGGEPSESGSSGESPGGSSGSESGSGGEPSESGSS

SEQ ID NO: 1284 - protein, 895 aa, Artificial Sequence
  Description of Artificial Sequence: Synthetic polypeptide
HAEGTFTSDVSSYLEGQAALEFIAWLVKGRGGSPAGSPTSTEEGTSESATPESGPGTSTEPSEGSAPGSPAGSPTSTEEGTSTEPSEGSAPGTSTEPSEGSAPGTSESATPESGPGSEPATSGSETPGSEPATSGSETPGSPAGSPTSTEEGTSESATPESGPGTSTEPSEGSAPGTSTEPSEGSAPGSPAGSPTSTEEGTSTEPSEGSAPGTSTEPSEGSAPGTSESATPESGPGTSTEPSEGSAPGTSESATPESGPGSEPATSGSETPGTSTEPSEGSAPGTSTEPSEGSAPGTSESATPESGPGTSESATPESGPGSPAGSPTSTEEGTSESATPESGPGSEPATSGSETPGTSESATPESGPGTSTEPSEGSAPGTSTEPSEGSAPGTSTEPSEGSAPGTSTEPSEGSAPGTSTEPSEGSAPGTSTEPSEGSAPGSPAGSPTSTEEGTSTEPSEGSAPGTSESATPESGPGSEPATSGSETPGTSESATPESGPGSEPATSGSETPGTSESATPESGPGTSTEPSEGSAPGTSESATPESGPGSPAGSPTSTEEGSPAGSPTSTEEGSPAGSPTSTEEGTSESATPESGPGTSTEPSEGSAPGTSESATPESGPGSEPATSGSETPGTSESATPESGPGSEPATSGSETPGTSESATPESGPGTSTEPSEGSAPGSPAGSPTSTEEGTSESATPESGPGSEPATSGSETPGTSESATPESGPGSPAGSPTSTEEGSPAGSPTSTEEGTSTEPSEGSAPGTSESATPESGPGTSESATPESGPGTSESATPESGPGSEPATSGSETPGSEPATSGSETPGSPAGSPTSTEEGTSTEPSEGSAPGTSTEPSEGSAPGSEPATSGSETPGTSESATPESGPGTSTEPSEGSAP

SEQ ID NO: 1285 - protein, 906 aa, Artificial Sequence
  Description of Artificial Sequence: Synthetic polypeptide
  MOD_RES (461)..(463): Any amino acid
  MOD_RES (474)..(477): Any amino acid
HAEGTFTSDVSSYLEGQAALEFIAWLVKGRGGSTSESPSGTAPGTSPSGESSTAPGSTSESPSGTAPGSTSESPSGTAPGTSTPESGSASPGTSTPESGSASPGSTSESPSGTAPGSTSESPSGTAPGTSPSGESSTAPGSTSESPSGTAPGTSPSGESSTAPGTSPSGESSTAPGSTSSTAESPGPGTSPSGESSTAPGTSPSGESSTAPGSTSSTAESPGPGTSTPESGSASPGTSTPESGSASPGSTSESPSGTAPGSTSESPSGTAPGTSTPESGSASPGSTSSTAESPGPGTSTPESGSASPGSTSESPSGTAPGTSPSGESSTAPGSTSSTAESPGPGTSPSGESSTAPGTSTPESGSASPGSTSSTAESPGPGSTSSTAESPGPGSTSSTAESPGPGSTSSTAESPGPGTSPSGESSTAPGSTSESPSGTAPGSTSESPSGTAPGTSTPESGPXXXGASASGAPSTXXXXSESPSGTAPGSTSESPSGTAPGSTSESPSGTAPGSTSESPSGTAPGSTSESPSGTAPGSTSESPSGTAPGTSTPESGSASPGTSPSGESSTAPGTSPSGESSTAPGSTSSTAESPGPGTSPSGESSTAPGTSTPESGSASPGSTSESPSGTAPGSTSESPSGTAPGTSPSGESSTAPGSTSESPSGTAPGTSTPESGSASPGTSTPESGSASPGSTSESPSGTAPGTSTPESGSASPGSTSSTAESPGPGSTSESPSGTAPGSTSESPSGTAPGTSPSGESSTAPGSTSSTAESPGPGTSPSGESSTAPGTSTPESGSASPGTSPSGESSTAPGTSPSGESSTAPGTSPSGESSTAPGSTSSTAESPGPGSTSSTAESPGPGTSPSGESSTAPGSSPSASTGTGPGSSTPSGATGSPGSSTPSGATGSP

SEQ ID NO: 1286 - protein, 895 aa, Artificial Sequence
  Description of Artificial Sequence: Synthetic polypeptide
HAEGTFTSDVSSYLEGQAALEFIAWLVKGRGGASPGTSSTGSPGSSPSASTGTGPGSSPSASTGTGPGTPGSGTASSSPGSSTPSGATGSPGSNPSASTGTGPGASPGTSSTGSPGTPGSGTASSSPGSSTPSGATGSPGTPGSGTASSSPGASPGTSSTGSPGASPGTSSTGSPGTPGSGTASSSPGSSTPSGATGSPGASPGTSSTGSPGTPGSGTASSSPGSSTPSGATGSPGSNPSASTGTGPGSSPSASTGTGPGSSTPSGATGSPGSSTPSGATGSPGASPGTSSTGSPGASPGTSSTGSPGASPGTSSTGSPGTPGSGTASSSPGASPGTSSTGSPGASPGTSSTGSPGASPGTSSTGSPGSSPSASTGTGPGTPGSGTASSSPGASPGTSSTGSPGASPGTSSTGSPGASPGTSSTGSPGSSTPSGATGSPGSSTPSGATGSPGASPGTSSTGSPGTPGSGTASSSPGSSTPSGATGSPGSSTPSGATGSPGSSTPSGATGSPGSSPSASTGTGPGASPGTSSTGSPGASPGTSSTGSPGTPGSGTASSSPGASPGTSSTGSPGASPGTSSTGSPGASPGTSSTGSPGASPGTSSTGSPGTPGSGTASSSPGSSTPSGATGSPGTPGSGTASSSPGSSTPSGATGSPGTPGSGTASSSPGSSTPSGATGSPGSSTPSGATGSPGSSPSASTGTGPGSSPSASTGTGPGASPGTSSTGSPGTPGSGTASSSPGSSTPSGATGSPGSSPSASTGTGPGSSPSASTGTGPGASPGTSSTGSPGASPGTSSTGSPGSSTPSGATGSPGSSPSASTGTGPGASPGTSSTGSPGSSPSASTGTGPGTPGSGTASSSPGSSTPSGATGSPGSSTPSGATGSPGASPGTSSTGSP

SEQ ID NO: 1287 - protein, 906 aa, Artificial Sequence
  Description of Artificial Sequence: Synthetic polypeptide
HAEGTFTSDVSSYLEGQAALEFIAWLVKGRGGTSTEPSEGSAPGSEPATSGSETPGSPAGSPTSTEEGSTSSTAESPGPGTSTPESGSASPGSTSESPSGTAPGSTSESPSGTAPGTSTPESGSASPGTSTPESGSASPGSEPATSGSETPGTSESATPESGPGSPAGSPTSTEEGTSTEPSEGSAPGTSESATPESGPGTSTEPSEGSAPGTSTEPSEGSAPGSPAGSPTSTEEGTSTEPSEGSAPGTSTEPSEGSAPGTSESATPESGPGTSESATPESGPGTSTEPSEGSAPGTSTEPSEGSAPGTSESATPESGPGTSTEPSEGSAPGSEPATSGSETPGSPAGSPTSTEEGSSTPSGATGSPGTPGSGTASSSPGSSTPSGATGSPGTSTEPSEGSAPGTSTEPSEGSAPGSEPATSGSETPGSPAGSPTSTEEGSPAGSPTSTEEGTSTEPSEGSAPGASASGAPSTGGTSESATPESGPGSPAGSPTSTEEGSPAGSPTSTEEGSTSSTAESPGPGSTSESPSGTAPGTSPSGESSTAPGTPGSGTASSSPGSSTPSGATGSPGSSPSASTGTGPGSEPATSGSETPGTSESATPESGPGSEPATSGSETPGSTSSTAESPGPGSTSSTAESPGPGTSPSGESSTAPGSEPATSGSETPGSEPATSGSETPGTSTEPSEGSAPGSTSSTAESPGPGTSTPESGSASPGSTSESPSGTAPGTSTEPSEGSAPGTSTEPSEGSAPGTSTEPSEGSAPGSSTPSGATGSPGSSPSASTGTGPGASPGTSSTGSPGSEPATSGSETPGTSESATPESGPGSPAGSPTSTEEGSSTPSGATGSPGSSPSASTGTGPGASPGTSSTGSPGTSESATPESGPGTSTEPSEGSAPGTSTEPSEGSAP

SEQ ID NO: 1288 - protein, 1349 aa, Artificial Sequence
  Description of Artificial Sequence: Synthetic polypeptide
HAEGTFTSDVSSYLEGQAALEFIAWLVKGRGGTSTEPSEGSAPGSEPATSGSETPGSPAGSPTSTEEGSTSSTAESPGPGTSTPESGSASPGSTSESPSGTAPGSTSESPSGTAPGTSTPESGSASPGTSTPESGSASPGSEPATSGSETPGTSESATPESGPGSPAGSPTSTEEGTSTEPSEGSAPGTSESATPESGPGTSTEPSEGSAPGTSTEPSEGSAPGSPAGSPTSTEEGTSTEPSEGSAPGTSTEPSEGSAPGTSESATPESGPGTSESATPESGPGTSTEPSEGSAPGTSTEPSEGSAPGTSESATPESGPGTSTEPSEGSAPGSEPATSGSETPGSPAGSPTSTEEGSSTPSGATGSPGTPGSGTASSSPGSSTPSGATGSPGTSTEPSEGSAPGTSTEPSEGSAPGSEPATSGSETPGSPAGSPTSTEEGSPAGSPTSTEEGTSTEPSEGSAPGPEPTGPAPSGGSEPATSGSETPGTSESATPESGPGSPAGSPTSTEEGTSESATPESGPGSPAGSPTSTEEGSPAGSPTSTEEGTSESATPESGPGSPAGSPTSTEEGSPAGSPTSTEEGSTSSTAESPGPGSTSESPSGTAPGTSPSGESSTAPGSTSESPSGTAPGSTSESPSGTAPGTSPSGESSTAPGTSTEPSEGSAPGTSESATPESGPGTSESATPESGPGSEPATSGSETPGTSESATPESGPGTSESATPESGPGTSTEPSEGSAPGTSESATPESGPGTSTEPSEGSAPGTSPSGESSTAPGTSPSGESSTAPGTSPSGESSTAPGTSTEPSEGSAPGSPAGSPTSTEEGTSTEPSEGSAPGSSPSASTGTGPGSSTPSGATGSPGSSTPSGATGSPGSSTPSGATGSPGSSTPSGATGSPGASPGTSSTGSPGASASGAPSTGGTSPSGESSTAPGSTSSTAESPGPGTSPSGESSTAPGTSESATPESGPGTSTEPSEGSAPGTSTEPSEGSAPGSSPSASTGTGPGSSTPSGATGSPGASPGTSSTGSPGTSTPESGSASPGTSPSGESSTAPGTSPSGESSTAPGTSESATPESGPGSEPATSGSETPGTSTEPSEGSAPGSTSESPSGTAPGSTSESPSGTAPGTSTPESGSASPGSPAGSPTSTEEGTSESATPESGPGTSTEPSEGSAPGSPAGSPTSTEEGTSESATPESGPGSEPATSGSETPGSSTPSGATGSPGASPGTSSTGSPGSSTPSGATGSPGSTSESPSGTAPGTSPSGESSTAPGSTSSTAESPGPGSSTPSGATGSPGASPGTSSTGSPGTPGSGTASSSPGSPAGSPTSTEEGSPAGSPTSTEEGTSTEPSEGSAP

SEQ ID NO: 1289 - protein, 944 aa, Artificial Sequence
  Description of Artificial Sequence: Synthetic polypeptide
MAEPAGSPTSTEEGTPGSGTASSSPGSSTPSGATGSPGASPGTSSTGSPGSPAGSPTSTEEGTSESATPESGPGTSTEPSEGSAPGSPAGSPTSTEEGTSTEPSEGSAPGTSTEPSEGSAPGTSESATPESGPGSEPATSGSETPGSEPATSGSETPGSPAGSPTSTEEGTSESATPESGPGTSTEPSEGSAPGTSTEPSEGSAPGSPAGSPTSTEEGTSTEPSEGSAPGTSTEPSEGSAPGTSESATPESGPGTSTEPSEGSAPGTSESATPESGPGSEPATSGSETPGTSTEPSEGSAPGTSTEPSEGSAPGTSESATPESGPGTSESATPESGPGSPAGSPTSTEEGTSESATPESGPGSEPATSGSETPGTSESATPESGPGTSTEPSEGSAPGTSTEPSEGSAPGTSTEPSEGSAPGTSTEPSEGSAPGTSTEPSEGSAPGTSTEPSEGSAPGSPAGSPTSTEEGTSTEPSEGSAPGTSESATPESGPGSEPATSGSETPGTSESATPESGPGSEPATSGSETPGTSESATPESGPGTSTEPSEGSAPGTSESATPESGPGSPAGSPTSTEEGSPAGSPTSTEEGSPAGSPTSTEEGTSESATPESGPGTSTEPSEGSAPGTSESATPESGPGSEPATSGSETPGTSESATPESGPGSEPATSGSETPGTSESATPESGPGTSTEPSEGSAPGSPAGSPTSTEEGTSESATPESGPGSEPATSGSETPGTSESATPESGPGSPAGSPTSTEEGSPAGSPTSTEEGTSTEPSEGSAPGTSESATPESGPGTSESATPESGPGTSESATPESGPGSEPATSGSETPGSEPATSGSETPGSPAGSPTSTEEGTSTEPSEGSAPGTSTEPSEGSAPGSEPATSGSETPGTSESATPESGPGTSTEPSEGSAPGHAEGTFTSDVSSYLEGQAALEFIAWLVKGR

SEQ ID NO: 1290 - protein, 955 aa, Artificial Sequence
  Description of Artificial Sequence: Synthetic polypeptide
MAEPAGSPTSTEEGASPGTSSTGSPGSSTPSGATGSPGSSTPSGATGSPGTSTEPSEGSAPGSEPATSGSETPGSPAGSPTSTEEGSTSSTAESPGPGTSTPESGSASPGSTSESPSGTAPGSTSESPSGTAPGTSTPESGSASPGTSTPESGSASPGSEPATSGSETPGTSESATPESGPGSPAGSPTSTEEGTSTEPSEGSAPGTSESATPESGPGTSTEPSEGSAPGTSTEPSEGSAPGSPAGSPTSTEEGTSTEPSEGSAPGTSTEPSEGSAPGTSESATPESGPGTSESATPESGPGTSTEPSEGSAPGTSTEPSEGSAPGTSESATPESGPGTSTEPSEGSAPGSEPATSGSETPGSPAGSPTSTEEGSSTPSGATGSPGTPGSGTASSSPGSSTPSGATGSPGTSTEPSEGSAPGTSTEPSEGSAPGSEPATSGSETPGSPAGSPTSTEEGSPAGSPTSTEEGTSTEPSEGSAPGASASGAPSTGGTSESATPESGPGSPAGSPTSTEEGSPAGSPTSTEEGSTSSTAESPGPGSTSESPSGTAPGTSPSGESSTAPGTPGSGTASSSPGSSTPSGATGSPGSSPSASTGTGPGSEPATSGSETPGTSESATPESGPGSEPATSGSETPGSTSSTAESPGPGSTSSTAESPGPGTSPSGESSTAPGSEPATSGSETPGSEPATSGSETPGTSTEPSEGSAPGSTSSTAESPGPGTSTPESGSASPGSTSESPSGTAPGTSTEPSEGSAPGTSTEPSEGSAPGTSTEPSEGSAPGSSTPSGATGSPGSSPSASTGTGPGASPGTSSTGSPGSEPATSGSETPGTSESATPESGPGSPAGSPTSTEEGSSTPSGATGSPGSSPSASTGTGPGASPGTSSTGSPGTSESATPESGPGTSTEPSEGSAPGTSTEPSEGSAPGHAEGTFTSDVSSYLEGQAALEFIAWLVKGR

SEQ ID NO: 1291 - protein, 175 aa, Artificial Sequence
  Description of Artificial Sequence: Synthetic polypeptide
GSEPATSGSETPGTSESATPESGPGSEPATSGSETPGSPAGSPTSTEEGTSTEPSEGSAPGSEPATSGSETPGSEPATSGSETPGSEPATSGSETPGTSTEPSEGSAPGTSESATPESGPGSEPATSGSETPGTSTEPSEGSAPGHAEGTFTSDVSSYLEGQAALEFIAWLVKGR

SEQ ID NO: 1292 - protein, 175 aa, Artificial Sequence
  Description of Artificial Sequence: Synthetic polypeptide
GTSTPESGSASPGTSPSGESSTAPGTSPSGESSTAPGSTSSTAESPGPGSTSESPSGTAPGSTSSTAESPGPGTSPSGESSTAPGTSTPESGSASPGSTSSTAESPGPGTSPSGESSTAPGTSPSGESSTAPGTSPSGESSTAPGHAEGTFTSDVSSYLEGQAALEFIAWLVKGR

SEQ ID NO: 1293 - protein, 319 aa, Artificial Sequence
  Description of Artificial Sequence: Synthetic polypeptide
GTSESATPESGPGSEPATSGSETPGTSESATPESGPGSEPATSGSETPGTSESATPESGPGTSTEPSEGSAPGSPAGSPTSTEEGTSESATPESGPGSEPATSGSETPGTSESATPESGPGSPAGSPTSTEEGSPAGSPTSTEEGTSTEPSEGSAPGTSESATPESGPGTSESATPESGPGTSESATPESGPGSEPATSGSETPGSEPATSGSETPGSPAGSPTSTEEGTSTEPSEGSAPGTSTEPSEGSAPGSEPATSGSETPGTSESATPESGPGTSTEPSEGSAPGHAEGTFTSDVSSYLEGQAALEFIAWLVKGR

SEQ ID NO: 1294 - protein, 607 aa, Artificial Sequence
  Description of Artificial Sequence: Synthetic polypeptide
GSPAGSPTSTEEGTSESATPESGPGTSTEPSEGSAPGSPAGSPTSTEEGTSTEPSEGSAPGTSTEPSEGSAPGTSESATPESGPGSEPATSGSETPGSEPATSGSETPGSPAGSPTSTEEGTSESATPESGPGTSTEPSEGSAPGTSTEPSEGSAPGSPAGSPTSTEEGTSTEPSEGSAPGTSTEPSEGSAPGTSESATPESGPGTSTEPSEGSAPGTSESATPESGPGSEPATSGSETPGTSTEPSEGSAPGTSTEPSEGSAPGTSESATPESGPGTSESATPESGPGSPAGSPTSTEEGTSESATPESGPGSEPATSGSETPGTSESATPESGPGTSTEPSEGSAPGTSTEPSEGSAPGTSTEPSEGSAPGTSTEPSEGSAPGTSTEPSEGSAPGTSTEPSEGSAPGSPAGSPTSTEEGTSTEPSEGSAPGTSESATPESGPGSEPATSGSETPGTSESATPESGPGSEPATSGSETPGTSESATPESGPGTSTEPSEGSAPGTSESATPESGPGSPAGSPTSTEEGSPAGSPTSTEEGSPAGSPTSTEEGTSESATPESGPGTSTEPSEGSAPGHAEGTFTSDVSSYLEGQAALEFIAWLVKGR

SEQ ID NO: 1295 - protein, 607 aa, Artificial Sequence
  Description of Artificial Sequence: Synthetic polypeptide
GSTSSTAESPGPGSTSSTAESPGPGSTSESPSGTAPGSTSSTAESPGPGSTSSTAESPGPGTSTPESGSASPGSTSESPSGTAPGTSPSGESSTAPGSTSESPSGTAPGSTSESPSGTAPGTSPSGESSTAPGSTSESPSGTAPGSTSESPSGTAPGTSPSGESSTAPGSTSESPSGTAPGSTSESPSGTAPGSTSESPSGTAPGTSTPESGSASPGSTSESPSGTAPGTSTPESGSASPGSTSSTAESPGPGSTSSTAESPGPGTSTPESGSASPGTSTPESGSASPGSTSESPSGTAPGTSTPESGSASPGTSTPESGSASPGSTSESPSGTAPGSTSESPSGTAPGSTSESPSGTAPGSTSSTAESPGPGTSTPESGSASPGTSTPESGSASPGSTSESPSGTAPGSTSESPSGTAPGTSTPESGSASPGSTSESPSGTAPGSTSESPSGTAPGTSTPESGSASPGTSPSGESSTAPGSTSSTAESPGPGTSPSGESSTAPGSTSSTAESPGPGTSTPESGSASPGSTSESPSGTAPGSTSSTAESPGPGTSTPESGSASPGTSTPESGSASPGHAEGTFTSDVSSYLEGQAALEFIAWLVKGR

SEQ ID NO: 1296 - protein, 867 aa, Artificial Sequence
  Description of Artificial Sequence: Synthetic polypeptide
GSSESGSSEGGPGSSESGSSEGGPGESPGGSSGSESGSGGEPSESGSSGESPGGSSGSESGESPGGSSGSESGSSESGSSEGGPGSSESGSSEGGPGSSESGSSEGGPGESPGGSSGSESGESPGGSSGSESGESPGGSSGSESGSSESGSSEGGPGSSESGSSEGGPGSSESGSSEGGPGSSESGSSEGGPGSSESGSSEGGPGSSESGSSEGGPGSGGEPSESGSSGESPGGSSGSESGESPGGSSGSESGSGGEPSESGSSGSEGSSGPGESSGSSESGSSEGGPGSGGEPSESGSSGSEGSSGPGESSGSSESGSSEGGPGSGGEPSESGSSGESPGGSSGSESGSGGEPSESGSSGSGGEPSESGSSGSSESGSSEGGPGSGGEPSESGSSGSGGEPSESGSSGSEGSSGPGESSGESPGGSSGSESGSEGSSGPGESSGSEGSSGPGESSGSGGEPSESGSSGSSESGSSEGGPGSSESGSSEGGPGESPGGSSGSESGSGGEPSESGSSGSEGSSGPGESSGESPGGSSGSESGSEGSSGPGSSESGSSEGGPGSGGEPSESGSSGSEGSSGPGESSGSEGSSGPGESSGSEGSSGPGESSGSGGEPSESGSSGSGGEPSESGSSGESPGGSSGSESGESPGGSSGSESGSGGEPSESGSSGSEGSSGPGESSGESPGGSSGSESGSSESGSSEGGPGSSESGSSEGGPGSSESGSSEGGPGSGGEPSESGSSGSSESGSSEGGPGESPGGSSGSESGSGGEPSESGSSGSSESGSSEGGPGESPGGSSGSESGSGGEPSESGSSGESPGGSSGSESGSGGEPSESGSSGHAEGTFTSDVSSYLEGQAALEFIAWLVKGR

SEQ ID NO: 1297 - protein, 895 aa, Artificial Sequence
  Description of Artificial Sequence: Synthetic polypeptide
GSPAGSPTSTEEGTSESATPESGPGTSTEPSEGSAPGSPAGSPTSTEEGTSTEPSEGSAPGTSTEPSEGSAPGTSESATPESGPGSEPATSGSETPGSEPATSGSETPGSPAGSPTSTEEGTSESATPESGPGTSTEPSEGSAPGTSTEPSEGSAPGSPAGSPTSTEEGTSTEPSEGSAPGTSTEPSEGSAPGTSESATPESGPGTSTEPSEGSAPGTSESATPESGPGSEPATSGSETPGTSTEPSEGSAPGTSTEPSEGSAPGTSESATPESGPGTSESATPESGPGSPAGSPTSTEEGTSESATPESGPGSEPATSGSETPGTSESATPESGPGTSTEPSEGSAPGTSTEPSEGSAPGTSTEPSEGSAPGTSTEPSEGSAPGTSTEPSEGSAPGTSTEPSEGSAPGSPAGSPTSTEEGTSTEPSEGSAPGTSESATPESGPGSEPATSGSETPGTSESATPESGPGSEPATSGSETPGTSESATPESGPGTSTEPSEGSAPGTSESATPESGPGSPAGSPTSTEEGSPAGSPTSTEEGSPAGSPTSTEEGTSESATPESGPGTSTEPSEGSAPGTSESATPESGPGSEPATSGSETPGTSESATPESGPGSEPATSGSETPGTSESATPESGPGTSTEPSEGSAPGSPAGSPTSTEEGTSESATPESGPGSEPATSGSETPGTSESATPESGPGSPAGSPTSTEEGSPAGSPTSTEEGTSTEPSEGSAPGTSESATPESGPGTSESATPESGPGTSESATPESGPGSEPATSGSETPGSEPATSGSETPGSPAGSPTSTEEGTSTEPSEGSAPGTSTEPSEGSAPGSEPATSGSETPGTSESATPESGPGTSTEPSEGSAPGHAEGTFTSDVSSYLEGQAALEFIAWLVKGR

SEQ ID NO: 1298 - protein, 906 aa, Artificial Sequence
  Description of Artificial Sequence: Synthetic polypeptide
  MOD_RES (430)..(432): Any amino acid
  MOD_RES (443)..(446): Any amino acid
GSTSESPSGTAPGTSPSGESSTAPGSTSESPSGTAPGSTSESPSGTAPGTSTPESGSASPGTSTPESGSASPGSTSESPSGTAPGSTSESPSGTAPGTSPSGESSTAPGSTSESPSGTAPGTSPSGESSTAPGTSPSGESSTAPGSTSSTAESPGPGTSPSGESSTAPGTSPSGESSTAPGSTSSTAESPGPGTSTPESGSASPGTSTPESGSASPGSTSESPSGTAPGSTSESPSGTAPGTSTPESGSASPGSTSSTAESPGPGTSTPESGSASPGSTSESPSGTAPGTSPSGESSTAPGSTSSTAESPGPGTSPSGESSTAPGTSTPESGSASPGSTSSTAESPGPGSTSSTAESPGPGSTSSTAESPGPGSTSSTAESPGPGTSPSGESSTAPGSTSESPSGTAPGSTSESPSGTAPGTSTPESGPXXXGASASGAPSTXXXXSESPSGTAPGSTSESPSGTAPGSTSESPSGTAPGSTSESPSGTAPGSTSESPSGTAPGSTSESPSGTAPGTSTPESGSASPGTSPSGESSTAPGTSPSGESSTAPGSTSSTAESPGPGTSPSGESSTAPGTSTPESGSASPGSTSESPSGTAPGSTSESPSGTAPGTSPSGESSTAPGSTSESPSGTAPGTSTPESGSASPGTSTPESGSASPGSTSESPSGTAPGTSTPESGSASPGSTSSTAESPGPGSTSESPSGTAPGSTSESPSGTAPGTSPSGESSTAPGSTSSTAESPGPGTSPSGESSTAPGTSTPESGSASPGTSPSGESSTAPGTSPSGESSTAPGTSPSGESSTAPGSTSSTAESPGPGSTSSTAESPGPGTSPSGESSTAPGSSPSASTGTGPGSSTPSGATGSPGSSTPSGATGSPGHAEGTFTSDVSSYLEGQAALEFIAWLVKGR

SEQ ID NO: 1299 - protein, 895 aa, Artificial Sequence
  Description of Artificial Sequence: Synthetic polypeptide
GASPGTSSTGSPGSSPSASTGTGPGSSPSASTGTGPGTPGSGTASSSPGSSTPSGATGSPGSNPSASTGTGPGASPGTSSTGSPGTPGSGTASSSPGSSTPSGATGSPGTPGSGTASSSPGASPGTSSTGSPGASPGTSSTGSPGTPGSGTASSSPGSSTPSGATGSPGASPGTSSTGSPGTPGSGTASSSPGSSTPSGATGSPGSNPSASTGTGPGSSPSASTGTGPGSSTPSGATGSPGSSTPSGATGSPGASPGTSSTGSPGASPGTSSTGSPGASPGTSSTGSPGTPGSGTASSSPGASPGTSSTGSPGASPGTSSTGSPGASPGTSSTGSPGSSPSASTGTGPGTPGSGTASSSPGASPGTSSTGSPGASPGTSSTGSPGASPGTSSTGSPGSSTPSGATGSPGSSTPSGATGSPGASPGTSSTGSPGTPGSGTASSSPGSSTPSGATGSPGSSTPSGATGSPGSSTPSGATGSPGSSPSASTGTGPGASPGTSSTGSPGASPGTSSTGSPGTPGSGTASSSPGASPGTSSTGSPGASPGTSSTGSPGASPGTSSTGSPGASPGTSSTGSPGTPGSGTASSSPGSSTPSGATGSPGTPGSGTASSSPGSSTPSGATGSPGTPGSGTASSSPGSSTPSGATGSPGSSTPSGATGSPGSSPSASTGTGPGSSPSASTGTGPGASPGTSSTGSPGTPGSGTASSSPGSSTPSGATGSPGSSPSASTGTGPGSSPSASTGTGPGASPGTSSTGSPGASPGTSSTGSPGSSTPSGATGSPGSSPSASTGTGPGASPGTSSTGSPGSSPSASTGTGPGTPGSGTASSSPGSSTPSGATGSPGSSTPSGATGSPGASPGTSSTGSPGHAEGTFTSDVSSYLEGQAALEFIAWLVKGR

SEQ ID NO: 1300 - protein, 906 aa, Artificial Sequence
  Description of Artificial Sequence: Synthetic polypeptide
GTSTEPSEGSAPGSEPATSGSETPGSPAGSPTSTEEGSTSSTAESPGPGTSTPESGSASPGSTSESPSGTAPGSTSESPSGTAPGTSTPESGSASPGTSTPESGSASPGSEPATSGSETPGTSESATPESGPGSPAGSPTSTEEGTSTEPSEGSAPGTSESATPESGPGTSTEPSEGSAPGTSTEPSEGSAPGSPAGSPTSTEEGTSTEPSEGSAPGTSTEPSEGSAPGTSESATPESGPGTSESATPESGPGTSTEPSEGSAPGTSTEPSEGSAPGTSESATPESGPGTSTEPSEGSAPGSEPATSGSETPGSPAGSPTSTEEGSSTPSGATGSPGTPGSGTASSSPGSSTPSGATGSPGTSTEPSEGSAPGTSTEPSEGSAPGSEPATSGSETPGSPAGSPTSTEEGSPAGSPTSTEEGTSTEPSEGSAPGASASGAPSTGGTSESATPESGPGSPAGSPTSTEEGSPAGSPTSTEEGSTSSTAESPGPGSTSESPSGTAPGTSPSGESSTAPGTPGSGTASSSPGSSTPSGATGSPGSSPSASTGTGPGSEPATSGSETPGTSESATPESGPGSEPATSGSETPGSTSSTAESPGPGSTSSTAESPGPGTSPSGESSTAPGSEPATSGSETPGSEPATSGSETPGTSTEPSEGSAPGSTSSTAESPGPGTSTPESGSASPGSTSESPSGTAPGTSTEPSEGSAPGTSTEPSEGSAPGTSTEPSEGSAPGSSTPSGATGSPGSSPSASTGTGPGASPGTSSTGSPGSEPATSGSETPGTSESATPESGPGSPAGSPTSTEEGSSTPSGATGSPGSSPSASTGTGPGASPGTSSTGSPGTSESATPESGPGTSTEPSEGSAPGTSTEPSEGSAPGHAEGTFTSDVSSYLEGQAALEFIAWLVKGR

SEQ ID NO: 1301 - protein, 1349 aa, Artificial Sequence
  Description of Artificial Sequence: Synthetic polypeptide
GTSTEPSEGSAPGSEPATSGSETPGSPAGSPTSTEEGSTSSTAESPGPGTSTPESGSASPGSTSESPSGTAPGSTSESPSGTAPGTSTPESGSASPGTSTPESGSASPGSEPATSGSETPGTSESATPESGPGSPAGSPTSTEEGTSTEPSEGSAPGTSESATPESGPGTSTEPSEGSAPGTSTEPSEGSAPGSPAGSPTSTEEGTSTEPSEGSAPGTSTEPSEGSAPGTSESATPESGPGTSESATPESGPGTSTEPSEGSAPGTSTEPSEGSAPGTSESATPESGPGTSTEPSEGSAPGSEPATSGSETPGSPAGSPTSTEEGSSTPSGATGSPGTPGSGTASSSPGSSTPSGATGSPGTSTEPSEGSAPGTSTEPSEGSAPGSEPATSGSETPGSPAGSPTSTEEGSPAGSPTSTEEGTSTEPSEGSAPGPEPTGPAPSGGSEPATSGSETPGTSESATPESGPGSPAGSPTSTEEGTSESATPESGPGSPAGSPTSTEEGSPAGSPTSTEEGTSESATPESGPGSPAGSPTSTEEGSPAGSPTSTEEGSTSSTAESPGPGSTSESPSGTAPGTSPSGESSTAPGSTSESPSGTAPGSTSESPSGTAPGTSPSGESSTAPGTSTEPSEGSAPGTSESATPESGPGTSESATPESGPGSEPATSGSETPGTSESATPESGPGTSESATPESGPGTSTEPSEGSAPGTSESATPESGPGTSTEPSEGSAPGTSPSGESSTAPGTSPSGESSTAPGTSPSGESSTAPGTSTEPSEGSAPGSPAGSPTSTEEGTSTEPSEGSAPGSSPSASTGTGPGSSTPSGATGSPGSSTPSGATGSPGSSTPSGATGSPGSSTPSGATGSPGASPGTSSTGSPGASASGAPSTGGTSPSGESSTAPGSTSSTAESPGPGTSPSGESSTAPGTSESATPESGPGTSTEPSEGSAPGTSTEPSEGSAPGSSPSASTGTGPGSSTPSGATGSPGASPGTSSTGSPGTSTPESGSASPGTSPSGESSTAPGTSPSGESSTAPGTSESATPESGPGSEPATSGSETPGTSTEPSEGSAPGSTSESPSGTAPGSTSESPSGTAPGTSTPESGSASPGSPAGSPTSTEEGTSESATPESGPGTSTEPSEGSAPGSPAGSPTSTEEGTSESATPESGPGSEPATSGSETPGSSTPSGATGSPGASPGTSSTGSPGSSTPSGATGSPGSTSESPSGTAPGTSPSGESSTAPGSTSSTAESPGPGSSTPSGATGSPGASPGTSSTGSPGTPGSGTASSSPGSPAGSPTSTEEGSPAGSPTSTEEGTSTEPSEGSAPGHAEGTFTSDVSSYLEGQAALEFIAWLVKGR

SEQ ID NO: 1302 - protein, 178 aa, Artificial Sequence
  Description of Artificial Sequence: Synthetic polypeptide
HADGSFSDEMNTILDNLAARDFINWLIETKITDGGSEPATSGSETPGTSESATPESGPGSEPATSGSETPGSPAGSPTSTEEGTSTEPSEGSAPGSEPATSGSETPGSEPATSGSETPGSEPATSGSETPGTSTEPSEGSAPGTSESATPESGPGSEPATSGSETPGTSTEPSEGSAP

SEQ ID NO: 1303 - protein, 178 aa, Artificial Sequence
  Description of Artificial Sequence: Synthetic polypeptide
HADGSFSDEMNTILDNLAARDFINWLIETKITDGGTSTPESGSASPGTSPSGESSTAPGTSPSGESSTAPGSTSSTAESPGPGSTSESPSGTAPGSTSSTAESPGPGTSPSGESSTAPGTSTPESGSASPGSTSSTAESPGPGTSPSGESSTAPGTSPSGESSTAPGTSPSGESSTAP

SEQ ID NO: 1304 - protein, 322 aa, Artificial Sequence
  Description of Artificial Sequence: Synthetic polypeptide
HADGSFSDEMNTILDNLAARDFINWLIETKITDGGTSESATPESGPGSEPATSGSETPGTSESATPESGPGSEPATSGSETPGTSESATPESGPGTSTEPSEGSAPGSPAGSPTSTEEGTSESATPESGPGSEPATSGSETPGTSESATPESGPGSPAGSPTSTEEGSPAGSPTSTEEGTSTEPSEGSAPGTSESATPESGPGTSESATPESGPGTSESATPESGPGSEPATSGSETPGSEPATSGSETPGSPAGSPTSTEEGTSTEPSEGSAPGTSTEPSEGSAPGSEPATSGSETPGTSESATPESGPGTSTEPSEGSAP

SEQ ID NO: 1305 - protein, 610 aa, Artificial Sequence
  Description of Artificial Sequence: Synthetic polypeptide
HADGSFSDEMNTILDNLAARDFINWLIETKITDGGSPAGSPTSTEEGTSESATPESGPGTSTEPSEGSAPGSPAGSPTSTEEGTSTEPSEGSAPGTSTEPSEGSAPGTSESATPESGPGSEPATSGSETPGSEPATSGSETPGSPAGSPTSTEEGTSESATPESGPGTSTEPSEGSAPGTSTEPSEGSAPGSPAGSPTSTEEGTSTEPSEGSAPGTSTEPSEGSAPGTSESATPESGPGTSTEPSEGSAPGTSESATPESGPGSEPATSGSETPGTSTEPSEGSAPGTSTEPSEGSAPGTSESATPESGPGTSESATPESGPGSPAGSPTSTEEGTSESATPESGPGSEPATSGSETPGTSESATPESGPGTSTEPSEGSAPGTSTEPSEGSAPGTSTEPSEGSAPGTSTEPSEGSAPGTSTEPSEGSAPGTSTEPSEGSAPGSPAGSPTSTEEGTSTEPSEGSAPGTSESATPESGPGSEPATSGSETPGTSESATPESGPGSEPATSGSETPGTSESATPESGPGTSTEPSEGSAPGTSESATPESGPGSPAGSPTSTEEGSPAGSPTSTEEGSPAGSPTSTEEGTSESATPESGPGTSTEPSEGSAP

SEQ ID NO: 1306 - protein, 610 aa, Artificial Sequence
  Description of Artificial Sequence: Synthetic polypeptide
HADGSFSDEMNTILDNLAARDFINWLIETKITDGGSTSSTAESPGPGSTSSTAESPGPGSTSESPSGTAPGSTSSTAESPGPGSTSSTAESPGPGTSTPESGSASPGSTSESPSGTAPGTSPSGESSTAPGSTSESPSGTAPGSTSESPSGTAPGTSPSGESSTAPGSTSESPSGTAPGSTSESPSGTAPGTSPSGESSTAPGSTSESPSGTAPGSTSESPSGTAPGSTSESPSGTAPGTSTPESGSASPGSTSESPSGTAPGTSTPESGSASPGSTSSTAESPGPGSTSSTAESPGPGTSTPESGSASPGTSTPESGSASPGSTSESPSGTAPGTSTPESGSASPGTSTPESGSASPGSTSESPSGTAPGSTSESPSGTAPGSTSESPSGTAPGSTSSTAESPGPGTSTPESGSASPGTSTPESGSASPGSTSESPSGTAPGSTSESPSGTAPGTSTPESGSASPGSTSESPSGTAPGSTSESPSGTAPGTSTPESGSASPGTSPSGESSTAPGSTSSTAESPGPGTSPSGESSTAPGSTSSTAESPGPGTSTPESGSASPGSTSESPSGTAPGSTSSTAESPGPGTSTPESGSASPGTSTPESGSASP

SEQ ID NO: 1307 - protein, 870 aa, Artificial Sequence
  Description of Artificial Sequence: Synthetic polypeptide
HADGSFSDEMNTILDNLAARDFINWLIETKITDGGSSESGSSEGGPGSSESGSSEGGPGESPGGSSGSESGSGGEPSESGSSGESPGGSSGSESGESPGGSSGSESGSSESGSSEGGPGSSESGSSEGGPGSSESGSSEGGPGESPGGSSGSESGESPGGSSGSESGESPGGSSGSESGSSESGSSEGGPGSSESGSSEGGPGSSESGSSEGGPGSSESGSSEGGPGSSESGSSEGGPGSSESGSSEGGPGSGGEPSESGSSGESPGGSSGSESGESPGGSSGSESGSGGEPSESGSSGSEGSSGPGESSGSSESGSSEGGPGSGGEPSESGSSGSEGSSGPGESSGSSESGSSEGGPGSGGEPSESGSSGESPGGSSGSESGSGGEPSESGSSGSGGEPSESGSSGSSESGSSEGGPGSGGEPSESGSSGSGGEPSESGSSGSEGSSGPGESSGESPGGSSGSESGSEGSSGPGESSGSEGSSGPGESSGSGGEPSESGSSGSSESGSSEGGPGSSESGSSEGGPGESPGGSSGSESGSGGEPSESGSSGSEGSSGPGESSGESPGGSSGSESGSEGSSGPGSSESGSSEGGPGSGGEPSESGSSGSEGSSGPGESSGSEGSSGPGESSGSEGSSGPGESSGSGGEPSESGSSGSGGEPSESGSSGESPGGSSGSESGESPGGSSGSESGSGGEPSESGSSGSEGSSGPGESSGESPGGSSGSESGSSESGSSEGGPGSSESGSSEGGPGSSESGSSEGGPGSGGEPSESGSSGSSESGSSEGGPGESPGGSSGSESGSGGEPSESGSSGSSESGSSEGGPGESPGGSSGSESGSGGEPSESGSSGESPGGSSGSESGSGGEPSESGSS

SEQ ID NO: 1308 - protein, 898 aa, Artificial Sequence
  Description of Artificial Sequence: Synthetic polypeptide
HADGSFSDEMNTILDNLAARDFINWLIETKITDGGSPAGSPTSTEEGTSESATPESGPGTSTEPSEGSAPGSPAGSPTSTEEGTSTEPSEGSAPGTSTEPSEGSAPGTSESATPESGPGSEPATSGSETPGSEPATSGSETPGSPAGSPTSTEEGTSESATPESGPGTSTEPSEGSAPGTSTEPSEGSAPGSPAGSPTSTEEGTSTEPSEGSAPGTSTEPSEGSAPGTSESATPESGPGTSTEPSEGSAPGTSESATPESGPGSEPATSGSETPGTSTEPSEGSAPGTSTEPSEGSAPGTSESATPESGPGTSESATPESGPGSPAGSPTSTEEGTSESATPESGPGSEPATSGSETPGTSESATPESGPGTSTEPSEGSAPGTSTEPSEGSAPGTSTEPSEGSAPGTSTEPSEGSAPGTSTEPSEGSAPGTSTEPSEGSAPGSPAGSPTSTEEGTSTEPSEGSAPGTSESATPESGPGSEPATSGSETPGTSESATPESGPGSEPATSGSETPGTSESATPESGPGTSTEPSEGSAPGTSESATPESGPGSPAGSPTSTEEGSPAGSPTSTEEGSPAGSPTSTEEGTSESATPESGPGTSTEPSEGSAPGTSESATPESGPGSEPATSGSETPGTSESATPESGPGSEPATSGSETPGTSESATPESGPGTSTEPSEGSAPGSPAGSPTSTEEGTSESATPESGPGSEPATSGSETPGTSESATPESGPGSPAGSPTSTEEGSPAGSPTSTEEGTSTEPSEGSAPGTSESATPESGPGTSESATPESGPGTSESATPESGPGSEPATSGSETPGSEPATSGSETPGSPAGSPTSTEEGTSTEPSEGSAPGTSTEPSEGSAPGSEPATSGSETPGTSESATPESGPGTSTEPSEGSAP

SEQ ID NO: 1309 - protein, 909 aa, Artificial Sequence
  Description of Artificial Sequence: Synthetic polypeptide
  MOD_RES (464)..(466): Any amino acid
  MOD_RES (477)..(480): Any amino acid
HADGSFSDEMNTILDNLAARDFINWLIETKITDGGSTSESPSGTAPGTSPSGESSTAPGSTSESPSGTAPGSTSESPSGTAPGTSTPESGSASPGTSTPESGSASPGSTSESPSGTAPGSTSESPSGTAPGTSPSGESSTAPGSTSESPSGTAPGTSPSGESSTAPGTSPSGESSTAPGSTSSTAESPGPGTSPSGESSTAPGTSPSGESSTAPGSTSSTAESPGPGTSTPESGSASPGTSTPESGSASPGSTSESPSGTAPGSTSESPSGTAPGTSTPESGSASPGSTSSTAESPGPGTSTPESGSASPGSTSESPSGTAPGTSPSGESSTAPGSTSSTAESPGPGTSPSGESSTAPGTSTPESGSASPGSTSSTAESPGPGSTSSTAESPGPGSTSSTAESPGPGSTSSTAESPGPGTSPSGESSTAPGSTSESPSGTAPGSTSESPSGTAPGTSTPESGPXXXGASASGAPSTXXXXSESPSGTAPGSTSESPSGTAPGSTSESPSGTAPGSTSESPSGTAPGSTSESPSGTAPGSTSESPSGTAPGTSTPESGSASPGTSPSGESSTAPGTSPSGESSTAPGSTSSTAESPGPGTSPSGESSTAPGTSTPESGSASPGSTSESPSGTAPGSTSESPSGTAPGTSPSGESSTAPGSTSESPSGTAPGTSTPESGSASPGTSTPESGSASPGSTSESPSGTAPGTSTPESGSASPGSTSSTAESPGPGSTSESPSGTAPGSTSESPSGTAPGTSPSGESSTAPGSTSSTAESPGPGTSPSGESSTAPGTSTPESGSASPGTSPSGESSTAPGTSPSGESSTAPGTSPSGESSTAPGSTSSTAESPGPGSTSSTAESPGPGTSPSGESSTAPGSSPSASTGTGPGSSTPSGATGSPGSSTPSGATGSP

SEQ ID NO: 1310 - protein, 898 aa, Artificial Sequence
  Description of Artificial Sequence: Synthetic polypeptide
HADGSFSDEMNTILDNLAARDFINWLIETKITDGGASPGTSSTGSPGSSPSASTGTGPGSSPSASTGTGPGTPGSGTASSSPGSSTPSGATGSPGSNPSASTGTGPGASPGTSSTGSPGTPGSGTASSSPGSSTPSGATGSPGTPGSGTASSSPGASPGTSSTGSPGASPGTSSTGSPGTPGSGTASSSPGSSTPSGATGSPGASPGTSSTGSPGTPGSGTASSSPGSSTPSGATGSPGSNPSASTGTGPGSSPSASTGTGPGSSTPSGATGSPGSSTPSGATGSPGASPGTSSTGSPGASPGTSSTGSPGASPGTSSTGSPGTPGSGTASSSPGASPGTSSTGSPGASPGTSSTGSPGASPGTSSTGSPGSSPSASTGTGPGTPGSGTASSSPGASPGTSSTGSPGASPGTSSTGSPGASPGTSSTGSPGSSTPSGATGSPGSSTPSGATGSPGASPGTSSTGSPGTPGSGTASSSPGSSTPSGATGSPGSSTPSGATGSPGSSTPSGATGSPGSSPSASTGTGPGASPGTSSTGSPGASPGTSSTGSPGTPGSGTASSSPGASPGTSSTGSPGASPGTSSTGSPGASPGTSSTGSPGASPGTSSTGSPGTPGSGTASSSPGSSTPSGATGSPGTPGSGTASSSPGSSTPSGATGSPGTPGSGTASSSPGSSTPSGATGSPGSSTPSGATGSPGSSPSASTGTGPGSSPSASTGTGPGASPGTSSTGSPGTPGSGTASSSPGSSTPSGATGSPGSSPSASTGTGPGSSPSASTGTGPGASPGTSSTGSPGASPGTSSTGSPGSSTPSGATGSPGSSPSASTGTGPGASPGTSSTGSPGSSPSASTGTGPGTPGSGTASSSPGSSTPSGATGSPGSSTPSGATGSPGASPGTSSTGSP

SEQ ID NO: 1311 - protein, 909 aa, Artificial Sequence
  Description of Artificial Sequence: Synthetic polypeptide
HADGSFSDEMNTILDNLAARDFINWLIETKITDGGTSTEPSEGSAPGSEPATSGSETPGSPAGSPTSTEEGSTSSTAESPGPGTSTPESGSASPGSTSESPSGTAPGSTSESPSGTAPGTSTPESGSASPGTSTPESGSASPGSEPATSGSETPGTSESATPESGPGSPAGSPTSTEEGTSTEPSEGSAPGTSESATPESGPGTSTEPSEGSAPGTSTEPSEGSAPGSPAGSPTSTEEGTSTEPSEGSAPGTSTEPSEGSAPGTSESATPESGPGTSESATPESGPGTSTEPSEGSAPGTSTEPSEGSAPGTSESATPESGPGTSTEPSEGSAPGSEPATSGSETPGSPAGSPTSTEEGSSTPSGATGSPGTPGSGTASSSPGSSTPSGATGSPGTSTEPSEGSAPGTSTEPSEGSAPGSEPATSGSETPGSPAGSPTSTEEGSPAGSPTSTEEGTSTEPSEGSAPGASASGAPSTGGTSESATPESGPGSPAGSPTSTEEGSPAGSPTSTEEGSTSSTAESPGPGSTSESPSGTAPGTSPSGESSTAPGTPGSGTASSSPGSSTPSGATGSPGSSPSASTGTGPGSEPATSGSETPGTSESATPESGPGSEPATSGSETPGSTSSTAESPGPGSTSSTAESPGPGTSPSGESSTAPGSEPATSGSETPGSEPATSGSETPGTSTEPSEGSAPGSTSSTAESPGPGTSTPESGSASPGSTSESPSGTAPGTSTEPSEGSAPGTSTEPSEGSAPGTSTEPSEGSAPGSSTPSGATGSPGSSPSASTGTGPGASPGTSSTGSPGSEPATSGSETPGTSESATPESGPGSPAGSPTSTEEGSSTPSGATGSPGSSPSASTGTGPGASPGTSSTGSPGTSESATPESGPGTSTEPSEGSAPGTSTEPSEGSAP

SEQ ID NO: 1312 - protein, 1352 aa, Artificial Sequence
  Description of Artificial Sequence: Synthetic polypeptide
HADGSFSDEMNTILDNLAARDFINWLIETKITDGGTSTEPSEGSAPGSEPATSGSETPGSPAGSPTSTEEGSTSSTAESPGPGTSTPESGSASPGSTSESPSGTAPGSTSESPSGTAPGTSTPESGSASPGTSTPESGSASPGSEPATSGSETPGTSESATPESGPGSPAGSPTSTEEGTSTEPSEGSAPGTSESATPESGPGTSTEPSEGSAPGTSTEPSEGSAPGSPAGSPTSTEEGTSTEPSEGSAPGTSTEPSEGSAPGTSESATPESGPGTSESATPESGPGTSTEPSEGSAPGTSTEPSEGSAPGTSESATPESGPGTSTEPSEGSAPGSEPATSGSETPGSPAGSPTSTEEGSSTPSGATGSPGTPGSGTASSSPGSSTPSGATGSPGTSTEPSEGSAPGTSTEPSEGSAPGSEPATSGSETPGSPAGSPTSTEEGSPAGSPTSTEEGTSTEPSEGSAPGPEPTGPAPSGGSEPATSGSETPGTSESATPESGPGSPAGSPTSTEEGTSESATPESGPGSPAGSPTSTEEGSPAGSPTSTEEGTSESATPESGPGSPAGSPTSTEEGSPAGSPTSTEEGSTSSTAESPGPGSTSESPSGTAPGTSPSGESSTAPGSTSESPSGTAPGSTSESPSGTAPGTSPSGESSTAPGTSTEPSEGSAPGTSESATPESGPGTSESATPESGPGSEPATSGSETPGTSESATPESGPGTSESATPESGPGTSTEPSEGSAPGTSESATPESGPGTSTEPSEGSAPGTSPSGESSTAPGTSPSGESSTAPGTSPSGESSTAPGTSTEPSEGSAPGSPAGSPTSTEEGTSTEPSEGSAPGSSPSASTGTGPGSSTPSGATGSPGSSTPSGATGSPGSSTPSGATGSPGSSTPSGATGSPGASPGTSSTGSPGASASGAPSTGGTSPSGESSTAPGSTSSTAESPGPGTSPSGESSTAPGTSESATPESGPGTSTEPSEGSAPGTSTEPSEGSAPGSSPSASTGTGPGSSTPSGATGSPGASPGTSSTGSPGTSTPESGSASPGTSPSGESSTAPGTSPSGESSTAPGTSESATPESGPGSEPATSGSETPGTSTEPSEGSAPGSTSESPSGTAPGSTSESPSGTAPGTSTPESGSASPGSPAGSPTSTEEGTSESATPESGPGTSTEPSEGSAPGSPAGSPTSTEEGTSESATPESGPGSEPATSGSETPGSSTPSGATGSPGASPGTSSTGSPGSSTPSGATGSPGSTSESPSGTAPGTSPSGESSTAPGSTSSTAESPGPGSSTPSGATGSPGASPGTSSTGSPGTPGSGTASSSPGSPAGSPTSTEEGSPAGSPTSTEEGTSTEPSEGSAP

SEQ ID NO: 1313 - protein, 947 aa, Artificial Sequence
  Description of Artificial Sequence: Synthetic polypeptide
MAEPAGSPTSTEEGTPGSGTASSSPGSSTPSGATGSPGASPGTSSTGSPGSPAGSPTSTEEGTSESATPESGPGTSTEPSEGSAPGSPAGSPTSTEEGTSTEPSEGSAPGTSTEPSEGSAPGTSESATPESGPGSEPATSGSETPGSEPATSGSETPGSPAGSPTSTEEGTSESATPESGPGTSTEPSEGSAPGTSTEPSEGSAPGSPAGSPTSTEEGTSTEPSEGSAPGTSTEPSEGSAPGTSESATPESGPGTSTEPSEGSAPGTSESATPESGPGSEPATSGSETPGTSTEPSEGSAPGTSTEPSEGSAPGTSESATPESGPGTSESATPESGPGSPAGSPTSTEEGTSESATPESGPGSEPATSGSETPGTSESATPESGPGTSTEPSEGSAPGTSTEPSEGSAPGTSTEPSEGSAPGTSTEPSEGSAPGTSTEPSEGSAPGTSTEPSEGSAPGSPAGSPTSTEEGTSTEPSEGSAPGTSESATPESGPGSEPATSGSETPGTSESATPESGPGSEPATSGSETPGTSESATPESGPGTSTEPSEGSAPGTSESATPESGPGSPAGSPTSTEEGSPAGSPTSTEEGSPAGSPTSTEEGTSESATPESGPGTSTEPSEGSAPGTSESATPESGPGSEPATSGSETPGTSESATPESGPGSEPATSGSETPGTSESATPESGPGTSTEPSEGSAPGSPAGSPTSTEEGTSESATPESGPGSEPATSGSETPGTSESATPESGPGSPAGSPTSTEEGSPAGSPTSTEEGTSTEPSEGSAPGTSESATPESGPGTSESATPESGPGTSESATPESGPGSEPATSGSETPGSEPATSGSETPGSPAGSPTSTEEGTSTEPSEGSAPGTSTEPSEGSAPGSEPATSGSETPGTSESATPESGPGTSTEPSEGSAPGHADGSFSDEMNTILDNLAARDFINWLIETKITD

SEQ ID NO: 1314 - protein, 958 aa, Artificial Sequence
  Description of Artificial Sequence: Synthetic polypeptide
MAEPAGSPTSTEEGASPGTSSTGSPGSSTPSGATGSPGSSTPSGATGSPGTSTEPSEGSAPGSEPATSGSETPGSPAGSPTSTEEGSTSSTAESPGPGTSTPESGSASPGSTSESPSGTAPGSTSESPSGTAPGTSTPESGSASPGTSTPESGSASPGSEPATSGSETPGTSESATPESGPGSPAGSPTSTEEGTSTEPSEGSAPGTSESATPESGPGTSTEPSEGSAPGTSTEPSEGSAPGSPAGSPTSTEEGTSTEPSEGSAPGTSTEPSEGSAPGTSESATPESGPGTSESATPESGPGTSTEPSEGSAPGTSTEPSEGSAPGTSESATPESGPGTSTEPSEGSAPGSEPATSGSETPGSPAGSPTSTEEGSSTPSGATGSPGTPGSGTASSSPGSSTPSGATGSPGTSTEPSEGSAPGTSTEPSEGSAPGSEPATSGSETPGSPAGSPTSTEEGSPAGSPTSTEEGTSTEPSEGSAPGASASGAPSTGGTSESATPESGPGSPAGSPTSTEEGSPAGSPTSTEEGSTSSTAESPGPGSTSESPSGTAPGTSPSGESSTAPGTPGSGTASSSPGSSTPSGATGSPGSSPSASTGTGPGSEPATSGSETPGTSESATPESGPGSEPATSGSETPGSTSSTAESPGPGSTSSTAESPGPGTSPSGESSTAPGSEPATSGSETPGSEPATSGSETPGTSTEPSEGSAPGSTSSTAESPGPGTSTPESGSASPGSTSESPSGTAPGTSTEPSEGSAPGTSTEPSEGSAPGTSTEPSEGSAPGSSTPSGATGSPGSSPSASTGTGPGASPGTSSTGSPGSEPATSGSETPGTSESATPESGPGSPAGSPTSTEEGSSTPSGATGSPGSSPSASTGTGPGASPGTSSTGSPGTSESATPESGPGTSTEPSEGSAPGTSTEPSEGSAPGHADGSFSDEMNTILDNLAARDFINWLIETKITD

SEQ ID NO: 1315 - protein, 178 aa, Artificial Sequence
  Description of Artificial Sequence: Synthetic polypeptide
GSEPATSGSETPGTSESATPESGPGSEPATSGSETPGSPAGSPTSTEEGTSTEPSEGSAPGSEPATSGSETPGSEPATSGSETPGSEPATSGSETPGTSTEPSEGSAPGTSESATPESGPGSEPATSGSETPGTSTEPSEGSAPGHADGSFSDEMNTILDNLAARDFINWLIETKITD

SEQ ID NO: 1316 - protein, 178 aa, Artificial Sequence
  Description of Artificial Sequence: Synthetic polypeptide
GTSTPESGSASPGTSPSGESSTAPGTSPSGESSTAPGSTSSTAESPGPGSTSESPSGTAPGSTSSTAESPGPGTSPSGESSTAPGTSTPESGSASPGSTSSTAESPGPGTSPSGESSTAPGTSPSGESSTAPGTSPSGESSTAPGHADGSFSDEMNTILDNLAARDFINWLIETKITD

SEQ ID NO: 1317 - protein, 322 aa, Artificial Sequence
  Description of Artificial Sequence: Synthetic polypeptide
GTSESATPESGPGSEPATSGSETPGTSESATPESGPGSEPATSGSETPGTSESATPESGPGTSTEPSEGSAPGSPAGSPTSTEEGTSESATPESGPGSEPATSGSETPGTSESATPESGPGSPAGSPTSTEEGSPAGSPTSTEEGTSTEPSEGSAPGTSESATPESGPGTSESATPESGPGTSESATPESGPGSEPATSGSETPGSEPATSGSETPGSPAGSPTSTEEGTSTEPSEGSAPGTSTEPSEGSAPGSEPATSGSETPGTSESATPESGPGTSTEPSEGSAPGHADGSFSDEMNTILDNLAARDFINWLIETKITD

SEQ ID NO: 1318 - protein, 610 aa, Artificial Sequence
  Description of Artificial Sequence: Synthetic polypeptide
GSPAGSPTSTEEGTSESATPESGPGTSTEPSEGSAPGSPAGSPTSTEEGTSTEPSEGSAPGTSTEPSEGSAPGTSESATPESGPGSEPATSGSETPGSEPATSGSETPGSPAGSPTSTEEGTSESATPESGPGTSTEPSEGSAPGTSTEPSEGSAPGSPAGSPTSTEEGTSTEPSEGSAPGTSTEPSEGSAPGTSESATPESGPGTSTEPSEGSAPGTSESATPESGPGSEPATSGSETPGTSTEPSEGSAPGTSTEPSEGSAPGTSESATPESGPGTSESATPESGPGSPAGSPTSTEEGTSESATPESGPGSEPATSGSETPGTSESATPESGPGTSTEPSEGSAPGTSTEPSEGSAPGTSTEPSEGSAPGTSTEPSEGSAPGTSTEPSEGSAPGTSTEPSEGSAPGSPAGSPTSTEEGTSTEPSEGSAPGTSESATPESGPGSEPATSGSETPGTSESATPESGPGSEPATSGSETPGTSESATPESGPGTSTEPSEGSAPGTSESATPESGPGSPAGSPTSTEEGSPAGSPTSTEEGSPAGSPTSTEEGTSESATPESGPGTSTEPSEGSAPGHADGSFSDEMNTILDNLAARDFINWLIETKITD

SEQ ID NO: 1319 - protein, 610 aa, Artificial Sequence
  Description of Artificial Sequence: Synthetic polypeptide
GSTSSTAESPGPGSTSSTAESPGPGSTSESPSGTAPGSTSSTAESPGPGSTSSTAESPGPGTSTPESGSASPGSTSESPSGTAPGTSPSGESSTAPGSTSESPSGTAPGSTSESPSGTAPGTSPSGESSTAPGSTSESPSGTAPGSTSESPSGTAPGTSPSGESSTAPGSTSESPSGTAPGSTSESPSGTAPGSTSESPSGTAPGTSTPESGSASPGSTSESPSGTAPGTSTPESGSASPGSTSSTAESPGPGSTSSTAESPGPGTSTPESGSASPGTSTPESGSASPGSTSESPSGTAPGTSTPESGSASPGTSTPESGSASPGSTSESPSGTAPGSTSESPSGTAPGSTSESPSGTAPGSTSSTAESPGPGTSTPESGSASPGTSTPESGSASPGSTSESPSGTAPGSTSESPSGTAPGTSTPESGSASPGSTSESPSGTAPGSTSESPSGTAPGTSTPESGSASPGTSPSGESSTAPGSTSSTAESPGPGTSPSGESSTAPGSTSSTAESPGPGTSTPESGSASPGSTSESPSGTAPGSTSSTAESPGPGTSTPESGSASPGTSTPESGSASPGHADGSFSDEMNTILDNLAARDFINWLIETKITD

SEQ ID NO: 1320 - protein, 870 aa, Artificial Sequence
  Description of Artificial Sequence: Synthetic polypeptide
GSSESGSSEGGPGSSESGSSEGGPGESPGGSSGSESGSGGEPSESGSSGESPGGSSGSESGESPGGSSGSESGSSESGSSEGGPGSSESGSSEGGPGSSESGSSEGGPGESPGGSSGSESGESPGGSSGSESGESPGGSSGSESGSSESGSSEGGPGSSESGSSEGGPGSSESGSSEGGPGSSESGSSEGGPGSSESGSSEGGPGSSESGSSEGGPGSGGEPSESGSSGESPGGSSGSESGESPGGSSGSESGSGGEPSESGSSGSEGSSGPGESSGSSESGSSEGGPGSGGEPSESGSSGSEGSSGPGESSGSSESGSSEGGPGSGGEPSESGSSGESPGGSSGSESGSGGEPSESGSSGSGGEPSESGSSGSSESGSSEGGPGSGGEPSESGSSGSGGEPSESGSSGSEGSSGPGESSGESPGGSSGSESGSEGSSGPGESSGSEGSSGPGESSGSGGEPSESGSSGSSESGSSEGGPGSSESGSSEGGPGESPGGSSGSESGSGGEPSESGSSGSEGSSGPGESSGESPGGSSGSESGSEGSSGPGSSESGSSEGGPGSGGEPSESGSSGSEGSSGPGESSGSEGSSGPGESSGSEGSSGPGESSGSGGEPSESGSSGSGGEPSESGSSGESPGGSSGSESGESPGGSSGSESGSGGEPSESGSSGSEGSSGPGESSGESPGGSSGSESGSSESGSSEGGPGSSESGSSEGGPGSSESGSSEGGPGSGGEPSESGSSGSSESGSSEGGPGESPGGSSGSESGSGGEPSESGSSGSSESGSSEGGPGESPGGSSGSESGSGGEPSESGSSGESPGGSSGSESGSGGEPSESGSSGHADGSFSDEMNTILDNLAARDFINWLIETKITD

SEQ ID NO: 1321 - protein, 898 aa, Artificial Sequence
  Description of Artificial Sequence: Synthetic polypeptide
GSPAGSPTSTEEGTSESATPESGPGTSTEPSEGSAPGSPAGSPTSTEEGTSTEPSEGSAPGTSTEPSEGSAPGTSESATPESGPGSEPATSGSETPGSEPATSGSETPGSPAGSPTSTEEGTSESATPESGPGTSTEPSEGSAPGTSTEPSEGSAPGSPAGSPTSTEEGTSTEPSEGSAPGTSTEPSEGSAPGTSESATPESGPGTSTEPSEGSAPGTSESATPESGPGSEPATSGSETPGTSTEPSEGSAPGTSTEPSEGSAPGTSESATPESGPGTSESATPESGPGSPAGSPTSTEEGTSESATPESGPGSEPATSGSETPGTSESATPESGPGTSTEPSEGSAPGTSTEPSEGSAPGTSTEPSEGSAPGTSTEPSEGSAPGTSTEPSEGSAPGTSTEPSEGSAPGSPAGSPTSTEEGTSTEPSEGSAPGTSESATPESGPGSEPATSGSETPGTSESATPESGPGSEPATSGSETPGTSESATPESGPGTSTEPSEGSAPGTSESATPESGPGSPAGSPTSTEEGSPAGSPTSTEEGSPAGSPTSTEEGTSESATPESGPGTSTEPSEGSAPGTSESATPESGPGSEPATSGSETPGTSESATPESGPGSEPATSGSETPGTSESATPESGPGTSTEPSEGSAPGSPAGSPTSTEEGTSESATPESGPGSEPATSGSETPGTSESATPESGPGSPAGSPTSTEEGSPAGSPTSTEEGTSTEPSEGSAPGTSESATPESGPGTSESATPESGPGTSESATPESGPGSEPATSGSETPGSEPATSGSETPGSPAGSPTSTEEGTSTEPSEGSAPGTSTEPSEGSAPGSEPATSGSETPGTSESATPESGPGTSTEPSEGSAPGHADGSFSDEMNTILDNLAARDFINWLIETKITD

SEQ ID NO: 1322 - protein, 909 aa, Artificial Sequence
  Description of Artificial Sequence: Synthetic polypeptide
  MOD_RES (430)..(432): Any amino acid
  MOD_RES (443)..(446): Any amino acid
GSTSESPSGTAPGTSPSGESSTAPGSTSESPSGTAPGSTSESPSGTAPGTSTPESGSASPGTSTPESGSASPGSTSESPSGTAPGSTSESPSGTAPGTSPSGESSTAPGSTSESPSGTAPGTSPSGESSTAPGTSPSGESSTAPGSTSSTAESPGPGTSPSGESSTAPGTSPSGESSTAPGSTSSTAESPGPGTSTPESGSASPGTSTPESGSASPGSTSESPSGTAPGSTSESPSGTAPGTSTPESGSASPGSTSSTAESPGPGTSTPESGSASPGSTSESPSGTAPGTSPSGESSTAPGSTSSTAESPGPGTSPSGESSTAPGTSTPESGSASPGSTSSTAESPGPGSTSSTAESPGPGSTSSTAESPGPGSTSSTAESPGPGTSPSGESSTAPGSTSESPSGTAPGSTSESPSGTAPGTSTPESGPXXXGASASGAPSTXXXXSESPSGTAPGSTSESPSGTAPGSTSESPSGTAPGSTSESPSGTAPGSTSESPSGTAPGSTSESPSGTAPGTSTPESGSASPGTSPSGESSTAPGTSPSGESSTAPGSTSSTAESPGPGTSPSGESSTAPGTSTPESGSASPGSTSESPSGTAPGSTSESPSGTAPGTSPSGESSTAPGSTSESPSGTAPGTSTPESGSASPGTSTPESGSASPGSTSESPSGTAPGTSTPESGSASPGSTSSTAESPGPGSTSESPSGTAPGSTSESPSGTAPGTSPSGESSTAPGSTSSTAESPGPGTSPSGESSTAPGTSTPESGSASPGTSPSGESSTAPGTSPSGESSTAPGTSPSGESSTAPGSTSSTAESPGPGSTSSTAESPGPGTSPSGESSTAPGSSPSASTGTGPGSSTPSGATGSPGSSTPSGATGSPGHADGSFSDEMNTILDNLAARDFINWLIETKITD

SEQ ID NO: 1323 - protein, 898 aa, Artificial Sequence
  Description of Artificial Sequence: Synthetic polypeptide
GASPGTSSTGSPGSSPSASTGTGPGSSPSASTGTGPGTPGSGTASSSPGSSTPSGATGSPGSNPSASTGTGPGASPGTSSTGSPGTPGSGTASSSPGSSTPSGATGSPGTPGSGTASSSPGASPGTSSTGSPGASPGTSSTGSPGTPGSGTASSSPGSSTPSGATGSPGASPGTSSTGSPGTPGSGTASSSPGSSTPSGATGSPGSNPSASTGTGPGSSPSASTGTGPGSSTPSGATGSPGSSTPSGATGSPGASPGTSSTGSPGASPGTSSTGSPGASPGTSSTGSPGTPGSGTASSSPGASPGTSSTGSPGASPGTSSTGSPGASPGTSSTGSPGSSPSASTGTGPGTPGSGTASSSPGASPGTSSTGSPGASPGTSSTGSPGASPGTSSTGSPGSSTPSGATGSPGSSTPSGATGSPGASPGTSSTGSPGTPGSGTASSSPGSSTPSGATGSPGSSTPSGATGSPGSSTPSGATGSPGSSPSASTGTGPGASPGTSSTGSPGASPGTSSTGSPGTPGSGTASSSPGASPGTSSTGSPGASPGTSSTGSPGASPGTSSTGSPGASPGTSSTGSPGTPGSGTASSSPGSSTPSGATGSPGTPGSGTASSSPGSSTPSGATGSPGTPGSGTASSSPGSSTPSGATGSPGSSTPSGATGSPGSSPSASTGTGPGSSPSASTGTGPGASPGTSSTGSPGTPGSGTASSSPGSSTPSGATGSPGSSPSASTGTGPGSSPSASTGTGPGASPGTSSTGSPGASPGTSSTGSPGSSTPSGATGSPGSSPSASTGTGPGASPGTSSTGSPGSSPSASTGTGPGTPGSGTASSSPGSSTPSGATGSPGSSTPSGATGSPGASPGTSSTGSPGHADGSFSDEMNTILDNLAARDFINWLIETKITD

SEQ ID NO: 1324 - protein, 909 aa, Artificial Sequence
  Description of Artificial Sequence: Synthetic polypeptide
GTSTEPSEGSAPGSEPATSGSETPGSPAGSPTSTEEGSTSSTAESPGPGTSTPESGSASPGSTSESPSGTAPGSTSESPSGTAPGTSTPESGSASPGTSTPESGSASPGSEPATSGSETPGTSESATPESGPGSPAGSPTSTEEGTSTEPSEGSAPGTSESATPESGPGTSTEPSEGSAPGTSTEPSEGSAPGSPAGSPTSTEEGTSTEPSEGSAPGTSTEPSEGSAPGTSESATPESGPGTSESATPESGPGTSTEPSEGSAPGTSTEPSEGSAPGTSESATPESGPGTSTEPSEGSAPGSEPATSGSETPGSPAGSPTSTEEGSSTPSGATGSPGTPGSGTASSSPGSSTPSGATGSPGTSTEPSEGSAPGTSTEPSEGSAPGSEPATSGSETPGSPAGSPTSTEEGSPAGSPTSTEEGTSTEPSEGSAPGASASGAPSTGGTSESATPESGPGSPAGSPTSTEEGSPAGSPTSTEEGSTSSTAESPGPGSTSESPSGTAPGTSPSGESSTAPGTPGSGTASSSPGSSTPSGATGSPGSSPSASTGTGPGSEPATSGSETPGTSESATPESGPGSEPATSGSETPGSTSSTAESPGPGSTSSTAESPGPGTSPSGESSTAPGSEPATSGSETPGSEPATSGSETPGTSTEPSEGSAPGSTSSTAESPGPGTSTPESGSASPGSTSESPSGTAPGTSTEPSEGSAPGTSTEPSEGSAPGTSTEPSEGSAPGSSTPSGATGSPGSSPSASTGTGPGASPGTSSTGSPGSEPATSGSETPGTSESATPESGPGSPAGSPTSTEEGSSTPSGATGSPGSSPSASTGTGPGASPGTSSTGSPGTSESATPESGPGTSTEPSEGSAPGTSTEPSEGSAPGHADGSFSDEMNTILDNLAARDFINWLIETKITD

SEQ ID NO: 1325 - protein, 1352 aa, Artificial Sequence
  Description of Artificial Sequence: Synthetic polypeptide
GTSTEPSEGSAPGSEPATSGSETPGSPAGSPTSTEEGSTSSTAESPGPGTSTPESGSASPGSTSESPSGTAPGSTSESPSGTAPGTSTPESGSASPGTSTPESGSASPGSEPATSGSETPGTSESATPESGPGSPAGSPTSTEEGTSTEPSEGSAPGTSESATPESGPGTSTEPSEGSAPGTSTEPSEGSAPGSPAGSPTSTEEGTSTEPSEGSAPGTSTEPSEGSAPGTSESATPESGPGTSESATPESGPGTSTEPSEGSAPGTSTEPSEGSAPGTSESATPESGPGTSTEPSEGSAPGSEPATSGSETPGSPAGSPTSTEEGSSTPSGATGSPGTPGSGTASSSPGSSTPSGATGSPGTSTEPSEGSAPGTSTEPSEGSAPGSEPATSGSETPGSPAGSPTSTEEGSPAGSPTSTEEGTSTEPSEGSAPGPEPTGPAPSGGSEPATSGSETPGTSESATPESGPGSPAGSPTSTEEGTSESATPESGPGSPAGSPTSTEEGSPAGSPTSTEEGTSESATPESGPGSPAGSPTSTEEGSPAGSPTSTEEGSTSSTAESPGPGSTSESPSGTAPGTSPSGESSTAPGSTSESPSGTAPGSTSESPSGTAPGTSPSGESSTAPGTSTEPSEGSAPGTSESATPESGPGTSESATPESGPGSEPATSGSETPGTSESATPESGPGTSESATPESGPGTSTEPSEGSAPGTSESATPESGPGTSTEPSEGSAPGTSPSGESSTAPGTSPSGESSTAPGTSPSGESSTAPGTSTEPSEGSAPGSPAGSPTSTEEGTSTEPSEGSAPGSSPSASTGTGPGSSTPSGATGSPGSSTPSGATGSPGSSTPSGATGSPGSSTPSGATGSPGASPGTSSTGSPGASASGAPSTGGTSPSGESSTAPGSTSSTAESPGPGTSPSGESSTAPGTSESATPESGPGTSTEPSEGSAPGTSTEPSEGSAPGSSPSASTGTGPGSSTPSGATGSPGASPGTSSTGSPGTSTPESGSASPGTSPSGESSTAPGTSPSGESSTAPGTSESATPESGPGSEPATSGSETPGTSTEPSEGSAPGSTSESPSGTAPGSTSESPSGTAPGTSTPESGSASPGSPAGSPTSTEEGTSESATPESGPGTSTEPSEGSAPGSPAGSPTSTEEGTSESATPESGPGSEPATSGSETPGSSTPSGATGSPGASPGTSSTGSPGSSTPSGATGSPGSTSESPSGTAPGTSPSGESSTAPGSTSSTAESPGPGSSTPSGATGSPGASPGTSSTGSPGTPGSGTASSSPGSPAGSPTSTEEGSPAGSPTSTEEGTSTEPSEGSAPGHADGSFSDEMNTILDNLAARDFINWLIETKITD

SEQ ID NO: 1326 - protein, 192 aa, Artificial Sequence
  Description of Artificial Sequence: Synthetic polypeptide
TQAQLLRVGCVLGTCQVQNLSHRLWQLMGPAGRQDSAPVDPSSPHSYGGSEPATSGSETPGTSESATPESGPGSEPATSGSETPGSPAGSPTSTEEGTSTEPSEGSAPGSEPATSGSETPGSEPATSGSETPGSEPATSGSETPGTSTEPSEGSAPGTSESATPESGPGSEPATSGSETPGTSTEPSEGSAP

SEQ ID NO: 1327 - protein, 192 aa, Artificial Sequence
  Description of Artificial Sequence: Synthetic polypeptide
TQAQLLRVGCVLGTCQVQNLSHRLWQLMGPAGRQDSAPVDPSSPHSYGGTSTPESGSASPGTSPSGESSTAPGTSPSGESSTAPGSTSSTAESPGPGSTSESPSGTAPGSTSSTAESPGPGTSPSGESSTAPGTSTPESGSASPGSTSSTAESPGPGTSPSGESSTAPGTSPSGESSTAPGTSPSGESSTAP

SEQ ID NO: 1328 - protein, 336 aa, Artificial Sequence
  Description of Artificial Sequence: Synthetic polypeptide
TQAQLLRVGCVLGTCQVQNLSHRLWQLMGPAGRQDSAPVDPSSPHSYGGTSESATPESGPGSEPATSGSETPGTSESATPESGPGSEPATSGSETPGTSESATPESGPGTSTEPSEGSAPGSPAGSPTSTEEGTSESATPESGPGSEPATSGSETPGTSESATPESGPGSPAGSPTSTEEGSPAGSPTSTEEGTSTEPSEGSAPGTSESATPESGPGTSESATPESGPGTSESATPESGPGSEPATSGSETPGSEPATSGSETPGSPAGSPTSTEEGTSTEPSEGSAPGTSTEPSEGSAPGSEPATSGSETPGTSESATPESGPGTSTEPSEGSAP

SEQ ID NO: 1329 - protein, 624 aa, Artificial Sequence
  Description of Artificial Sequence: Synthetic polypeptide
TQAQLLRVGCVLGTCQVQNLSHRLWQLMGPAGRQDSAPVDPSSPHSYGGSPAGSPTSTEEGTSESATPESGPGTSTEPSEGSAPGSPAGSPTSTEEGTSTEPSEGSAPGTSTEPSEGSAPGTSESATPESGPGSEPATSGSETPGSEPATSGSETPGSPAGSPTSTEEGTSESATPESGPGTSTEPSEGSAPGTSTEPSEGSAPGSPAGSPTSTEEGTSTEPSEGSAPGTSTEPSEGSAPGTSESATPESGPGTSTEPSEGSAPGTSESATPESGPGSEPATSGSETPGTSTEPSEGSAPGTSTEPSEGSAPGTSESATPESGPGTSESATPESGPGSPAGSPTSTEEGTSESATPESGPGSEPATSGSETPGTSESATPESGPGTSTEPSEGSAPGTSTEPSEGSAPGTSTEPSEGSAPGTSTEPSEGSAPGTSTEPSEGSAPGTSTEPSEGSAPGSPAGSPTSTEEGTSTEPSEGSAPGTSESATPESGPGSEPATSGSETPGTSESATPESGPGSEPATSGSETPGTSESATPESGPGTSTEPSEGSAPGTSESATPESGPGSPAGSPTSTEEGSPAGSPTSTEEGSPAGSPTSTEEGTSESATPESGPGTSTEPSEGSAP

SEQ ID NO: 1330 - protein, 624 aa, Artificial Sequence
  Description of Artificial Sequence: Synthetic polypeptide
TQAQLLRVGCVLGTCQVQNLSHRLWQLMGPAGRQDSAPVDPSSPHSYGGSTSSTAESPGPGSTSSTAESPGPGSTSESPSGTAPGSTSSTAESPGPGSTSSTAESPGPGTSTPESGSASPGSTSESPSGTAPGTSPSGESSTAPGSTSESPSGTAPGSTSESPSGTAPGTSPSGESSTAPGSTSESPSGTAPGSTSESPSGTAPGTSPSGESSTAPGSTSESPSGTAPGSTSESPSGTAPGSTSESPSGTAPGTSTPESGSASPGSTSESPSGTAPGTSTPESGSASPGSTSSTAESPGPGSTSSTAESPGPGTSTPESGSASPGTSTPESGSASPGSTSESPSGTAPGTSTPESGSASPGTSTPESGSASPGSTSESPSGTAPGSTSESPSGTAPGSTSESPSGTAPGSTSSTAESPGPGTSTPESGSASPGTSTPESGSASPGSTSESPSGTAPGSTSESPSGTAPGTSTPESGSASPGSTSESPSGTAPGSTSESPSGTAPGTSTPESGSASPGTSPSGESSTAPGSTSSTAESPGPGTSPSGESSTAPGSTSSTAESPGPGTSTPESGSASPGSTSESPSGTAPGSTSSTAESPGPGTSTPESGSASPGTSTPESGSASP

SEQ ID NO: 1331 - protein, 884 aa, Artificial Sequence
  Description of Artificial Sequence: Synthetic polypeptide
TQAQLLRVGCVLGTCQVQNLSHRLWQLMGPAGRQDSAPVDPSSPHSYGGSSESGSSEGGPGSSESGSSEGGPGESPGGSSGSESGSGGEPSESGSSGESPGGSSGSESGESPGGSSGSESGSSESGSSEGGPGSSESGSSEGGPGSSESGSSEGGPGESPGGSSGSESGESPGGSSGSESGESPGGSSGSESGSSESGSSEGGPGSSESGSSEGGPGSSESGSSEGGPGSSESGSSEGGPGSSESGSSEGGPGSSESGSSEGGPGSGGEPSESGSSGESPGGSSGSESGESPGGSSGSESGSGGEPSESGSSGSEGSSGPGESSGSSESGSSEGGPGSGGEPSESGSSGSEGSSGPGESSGSSESGSSEGGPGSGGEPSESGSSGESPGGSSGSESGSGGEPSESGSSGSGGEPSESGSSGSSESGSSEGGPGSGGEPSESGSSGSGGEPSESGSSGSEGSSGPGESSGESPGGSSGSESGSEGSSGPGESSGSEGSSGPGESSGSGGEPSESGSSGSSESGSSEGGPGSSESGSSEGGPGESPGGSSGSESGSGGEPSESGSSGSEGSSGPGESSGESPGGSSGSESGSEGSSGPGSSESGSSEGGPGSGGEPSESGSSGSEGSSGPGESSGSEGSSGPGESSGSEGSSGPGESSGSGGEPSESGSSGSGGEPSESGSSGESPGGSSGSESGESPGGSSGSESGSGGEPSESGSSGSEGSSGPGESSGESPGGSSGSESGSSESGSSEGGPGSSESGSSEGGPGSSESGSSEGGPGSGGEPSESGSSGSSESGSSEGGPGESPGGSSGSESGSGGEPSESGSSGSSESGSSEGGPGESPGGSSGSESGSGGEPSESGSSGESPGGSSGSESGSGGEPSESGSS

SEQ ID NO: 1332 - protein, 912 aa, Artificial Sequence
  Description of Artificial Sequence: Synthetic polypeptide
TQAQLLRVGCVLGTCQVQNLSHRLWQLMGPAGRQDSAPVDPSSPHSYGGSPAGSPTSTEEGTSESATPESGPGTSTEPSEGSAPGSPAGSPTSTEEGTSTEPSEGSAPGTSTEPSEGSAPGTSESATPESGPGSEPATSGSETPGSEPATSGSETPGSPAGSPTSTEEGTSESATPESGPGTSTEPSEGSAPGTSTEPSEGSAPGSPAGSPTSTEEGTSTEPSEGSAPGTSTEPSEGSAPGTSESATPESGPGTSTEPSEGSAPGTSESATPESGPGSEPATSGSETPGTSTEPSEGSAPGTSTEPSEGSAPGTSESATPESGPGTSESATPESGPGSPAGSPTSTEEGTSESATPESGPGSEPATSGSETPGTSESATPESGPGTSTEPSEGSAPGTSTEPSEGSAPGTSTEPSEGSAPGTSTEPSEGSAPGTSTEPSEGSAPGTSTEPSEGSAPGSPAGSPTSTEEGTSTEPSEGSAPGTSESATPESGPGSEPATSGSETPGTSESATPESGPGSEPATSGSETPGTSESATPESGPGTSTEPSEGSAPGTSESATPESGPGSPAGSPTSTEEGSPAGSPTSTEEGSPAGSPTSTEEGTSESATPESGPGTSTEPSEGSAPGTSESATPESGPGSEPATSGSETPGTSESATPESGPGSEPATSGSETPGTSESATPESGPGTSTEPSEGSAPGSPAGSPTSTEEGTSESATPESGPGSEPATSGSETPGTSESATPESGPGSPAGSPTSTEEGSPAGSPTSTEEGTSTEPSEGSAPGTSESATPESGPGTSESATPESGPGTSESATPESGPGSEPATSGSETPGSEPATSGSETPGSPAGSPTSTEEGTSTEPSEGSAPGTSTEPSEGSAPGSEPATSGSETPGTSESATPESGPGTSTEPSEGSAP

SEQ ID NO: 1333 - protein, 923 aa, Artificial Sequence
  Description of Artificial Sequence: Synthetic polypeptide
  MOD_RES (478)..(480): Any amino acid
  MOD_RES (491)..(494): Any amino acid
TQAQLLRVGCVLGTCQVQNLSHRLWQLMGPAGRQDSAPVDPSSPHSYGGSTSESPSGTAPGTSPSGESSTAPGSTSESPSGTAPGSTSESPSGTAPGTSTPESGSASPGTSTPESGSASPGSTSESPSGTAPGSTSESPSGTAPGTSPSGESSTAPGSTSESPSGTAPGTSPSGESSTAPGTSPSGESSTAPGSTSSTAESPGPGTSPSGESSTAPGTSPSGESSTAPGSTSSTAESPGPGTSTPESGSASPGTSTPESGSASPGSTSESPSGTAPGSTSESPSGTAPGTSTPESGSASPGSTSSTAESPGPGTSTPESGSASPGSTSESPSGTAPGTSPSGESSTAPGSTSSTAESPGPGTSPSGESSTAPGTSTPESGSASPGSTSSTAESPGPGSTSSTAESPGPGSTSSTAESPGPGSTSSTAESPGPGTSPSGESSTAPGSTSESPSGTAPGSTSESPSGTAPGTSTPESGPXXXGASASGAPSTXXXXSESPSGTAPGSTSESPSGTAPGSTSESPSGTAPGSTSESPSGTAPGSTSESPSGTAPGSTSESPSGTAPGTSTPESGSASPGTSPSGESSTAPGTSPSGESSTAPGSTSSTAESPGPGTSPSGESSTAPGTSTPESGSASPGSTSESPSGTAPGSTSESPSGTAPGTSPSGESSTAPGSTSESPSGTAPGTSTPESGSASPGTSTPESGSASPGSTSESPSGTAPGTSTPESGSASPGSTSSTAESPGPGSTSESPSGTAPGSTSESPSGTAPGTSPSGESSTAPGSTSSTAESPGPGTSPSGESSTAPGTSTPESGSASPGTSPSGESSTAPGTSPSGESSTAPGTSPSGESSTAPGSTSSTAESPGPGSTSSTAESPGPGTSPSGESSTAPGSSPSASTGTGPGSSTPSGATGSPGSSTPSGATGSP

SEQ ID NO: 1334 - protein, 912 aa, Artificial Sequence
  Description of Artificial Sequence: Synthetic polypeptide
TQAQLLRVGCVLGTCQVQNLSHRLWQLMGPAGRQDSAPVDPSSPHSYGGASPGTSSTGSPGSSPSASTGTGPGSSPSASTGTGPGTPGSGTASSSPGSSTPSGATGSPGSNPSASTGTGPGASPGTSSTGSPGTPGSGTASSSPGSSTPSGATGSPGTPGSGTASSSPGASPGTSSTGSPGASPGTSSTGSPGTPGSGTASSSPGSSTPSGATGSPGASPGTSSTGSPGTPGSGTASSSPGSSTPSGATGSPGSNPSASTGTGPGSSPSASTGTGPGSSTPSGATGSPGSSTPSGATGSPGASPGTSSTGSPGASPGTSSTGSPGASPGTSSTGSPGTPGSGTASSSPGASPGTSSTGSPGASPGTSSTGSPGASPGTSSTGSPGSSPSASTGTGPGTPGSGTASSSPGASPGTSSTGSPGASPGTSSTGSPGASPGTSSTGSPGSSTPSGATGSPGSSTPSGATGSPGASPGTSSTGSPGTPGSGTASSSPGSSTPSGATGSPGSSTPSGATGSPGSSTPSGATGSPGSSPSASTGTGPGASPGTSSTGSPGASPGTSSTGSPGTPGSGTASSSPGASPGTSSTGSPGASPGTSSTGSPGASPGTSSTGSPGASPGTSSTGSPGTPGSGTASSSPGSSTPSGATGSPGTPGSGTASSSPGSSTPSGATGSPGTPGSGTASSSPGSSTPSGATGSPGSSTPSGATGSPGSSPSASTGTGPGSSPSASTGTGPGASPGTSSTGSPGTPGSGTASSSPGSSTPSGATGSPGSSPSASTGTGPGSSPSASTGTGPGASPGTSSTGSPGASPGTSSTGSPGSSTPSGATGSPGSSPSASTGTGPGASPGTSSTGSPGSSPSASTGTGPGTPGSGTASSSPGSSTPSGATGSPGSSTPSGATGSPGASPGTSSTGSP

SEQ ID NO: 1335 - protein, 923 aa, Artificial Sequence
  Description of Artificial Sequence: Synthetic polypeptide
TQAQLLRVGCVLGTCQVQNLSHRLWQLMGPAGRQDSAPVDPSSPHSYGGTSTEPSEGSAPGSEPATSGSETPGSPAGSPTSTEEGSTSSTAESPGPGTSTPESGSASPGSTSESPSGTAPGSTSESPSGTAPGTSTPESGSASPGTSTPESGSASPGSEPATSGSETPGTSESATPESGPGSPAGSPTSTEEGTSTEPSEGSAPGTSESATPESGPGTSTEPSEGSAPGTSTEPSEGSAPGSPAGSPTSTEEGTSTEPSEGSAPGTSTEPSEGSAPGTSESATPESGPGTSESATPESGPGTSTEPSEGSAPGTSTEPSEGSAPGTSESATPESGPGTSTEPSEGSAPGSEPATSGSETPGSPAGSPTSTEEGSSTPSGATGSPGTPGSGTASSSPGSSTPSGATGSPGTSTEPSEGSAPGTSTEPSEGSAPGSEPATSGSETPGSPAGSPTSTEEGSPAGSPTSTEEGTSTEPSEGSAPGASASGAPSTGGTSESATPESGPGSPAGSPTSTEEGSPAGSPTSTEEGSTSSTAESPGPGSTSESPSGTAPGTSPSGESSTAPGTPGSGTASSSPGSSTPSGATGSPGSSPSASTGTGPGSEPATSGSETPGTSESATPESGPGSEPATSGSETPGSTSSTAESPGPGSTSSTAESPGPGTSPSGESSTAPGSEPATSGSETPGSEPATSGSETPGTSTEPSEGSAPGSTSSTAESPGPGTSTPESGSASPGSTSESPSGTAPGTSTEPSEGSAPGTSTEPSEGSAPGTSTEPSEGSAPGSSTPSGATGSPGSSPSASTGTGPGASPGTSSTGSPGSEPATSGSETPGTSESATPESGPGSPAGSPTSTEEGSSTPSGATGSPGSSPSASTGTGPGASPGTSSTGSPGTSESATPESGPGTSTEPSEGSAPGTSTEPSEGSAP

SEQ ID NO: 1336 - protein, 961 aa, Artificial Sequence
  Description of Artificial Sequence: Synthetic polypeptide
MAEPAGSPTSTEEGTPGSGTASSSPGSSTPSGATGSPGASPGTSSTGSPGSPAGSPTSTEEGTSESATPESGPGTSTEPSEGSAPGSPAGSPTSTEEGTSTEPSEGSAPGTSTEPSEGSAPGTSESATPESGPGSEPATSGSETPGSEPATSGSETPGSPAGSPTSTEEGTSESATPESGPGTSTEPSEGSAPGTSTEPSEGSAPGSPAGSPTSTEEGTSTEPSEGSAPGTSTEPSEGSAPGTSESATPESGPGTSTEPSEGSAPGTSESATPESGPGSEPATSGSETPGTSTEPSEGSAPGTSTEPSEGSAPGTSESATPESGPGTSESATPESGPGSPAGSPTSTEEGTSESATPESGPGSEPATSGSETPGTSESATPESGPGTSTEPSEGSAPGTSTEPSEGSAPGTSTEPSEGSAPGTSTEPSEGSAPGTSTEPSEGSAPGTSTEPSEGSAPGSPAGSPTSTEEGTSTEPSEGSAPGTSESATPESGPGSEPATSGSETPGTSESATPESGPGSEPATSGSETPGTSESATPESGPGTSTEPSEGSAPGTSESATPESGPGSPAGSPTSTEEGSPAGSPTSTEEGSPAGSPTSTEEGTSESATPESGPGTSTEPSEGSAPGTSESATPESGPGSEPATSGSETPGTSESATPESGPGSEPATSGSETPGTSESATPESGPGTSTEPSEGSAPGSPAGSPTSTEEGTSESATPESGPGSEPATSGSETPGTSESATPESGPGSPAGSPTSTEEGSPAGSPTSTEEGTSTEPSEGSAPGTSESATPESGPGTSESATPESGPGTSESATPESGPGSEPATSGSETPGSEPATSGSETPGSPAGSPTSTEEGTSTEPSEGSAPGTSTEPSEGSAPGSEPATSGSETPGTSESATPESGPGTSTEPSEGSAPGTQAQLLRVGCVLGTCQVQNLSHRLWQLMGPAGRQDSAPVDPSSPHSY

SEQ ID NO: 1337 - protein, 972 aa, Artificial Sequence
  Description of Artificial Sequence: Synthetic polypeptide
MAEPAGSPTSTEEGASPGTSSTGSPGSSTPSGATGSPGSSTPSGATGSPGTSTEPSEGSAPGSEPATSGSETPGSPAGSPTSTEEGSTSSTAESPGPGTSTPESGSASPGSTSESPSGTAPGSTSESPSGTAPGTSTPESGSASPGTSTPESGSASPGSEPATSGSETPGTSESATPESGPGSPAGSPTSTEEGTSTEPSEGSAPGTSESATPESGPGTSTEPSEGSAPGTSTEPSEGSAPGSPAGSPTSTEEGTSTEPSEGSAPGTSTEPSEGSAPGTSESATPESGPGTSESATPESGPGTSTEPSEGSAPGTSTEPSEGSAPGTSESATPESGPGTSTEPSEGSAPGSEPATSGSETPGSPAGSPTSTEEGSSTPSGATGSPGTPGSGTASSSPGSSTPSGATGSPGTSTEPSEGSAPGTSTEPSEGSAPGSEPATSGSETPGSPAGSPTSTEEGSPAGSPTSTEEGTSTEPSEGSAPGASASGAPSTGGTSESATPESGPGSPAGSPTSTEEGSPAGSPTSTEEGSTSSTAESPGPGSTSESPSGTAPGTSPSGESSTAPGTPGSGTASSSPGSSTPSGATGSPGSSPSASTGTGPGSEPATSGSETPGTSESATPESGPGSEPATSGSETPGSTSSTAESPGPGSTSSTAESPGPGTSPSGESSTAPGSEPATSGSETPGSEPATSGSETPGTSTEPSEGSAPGSTSSTAESPGPGTSTPESGSASPGSTSESPSGTAPGTSTEPSEGSAPGTSTEPSEGSAPGTSTEPSEGSAPGSSTPSGATGSPGSSPSASTGTGPGASPGTSSTGSPGSEPATSGSETPGTSESATPESGPGSPAGSPTSTEEGSSTPSGATGSPGSSPSASTGTGPGASPGTSSTGSPGTSESATPESGPGTSTEPSEGSAPGTSTEPSEGSAPGTQAQLLRVGCVLGTCQVQNLSHRLWQLMGPAGRQDSAPVDPSSPHSY

SEQ ID NO: 1338 - protein, 192 aa, Artificial Sequence
  Description of Artificial Sequence: Synthetic polypeptide
GSEPATSGSETPGTSESATPESGPGSEPATSGSETPGSPAGSPTSTEEGTSTEPSEGSAPGSEPATSGSETPGSEPATSGSETPGSEPATSGSETPGTSTEPSEGSAPGTSESATPESGPGSEPATSGSETPGTSTEPSEGSAPGTQAQLLRVGCVLGTCQVQNLSHRLWQLMGPAGRQDSAPVDPSSPHSY

SEQ ID NO: 1339 - protein, 192 aa, Artificial Sequence
  Description of Artificial Sequence: Synthetic polypeptide
GTSTPESGSASPGTSPSGESSTAPGTSPSGESSTAPGSTSSTAESPGPGSTSESPSGTAPGSTSSTAESPGPGTSPSGESSTAPGTSTPESGSASPGSTSSTAESPGPGTSPSGESSTAPGTSPSGESSTAPGTSPSGESSTAPGTQAQLLRVGCVLGTCQVQNLSHRLWQLMGPAGRQDSAPVDPSSPHSY

SEQ ID NO: 1340 - protein, 336 aa, Artificial Sequence
  Description of Artificial Sequence: Synthetic polypeptide
GTSESATPESGPGSEPATSGSETPGTSESATPESGPGSEPATSGSETPGTSESATPESGPGTSTEPSEGSAPGSPAGSPTSTEEGTSESATPESGPGSEPATSGSETPGTSESATPESGPGSPAGSPTSTEEGSPAGSPTSTEEGTSTEPSEGSAPGTSESATPESGPGTSESATPESGPGTSESATPESGPGSEPATSGSETPGSEPATSGSETPGSPAGSPTSTEEGTSTEPSEGSAPGTSTEPSEGSAPGSEPATSGSETPGTSESATPESGPGTSTEPSEGSAPGTQAQLLRVGCVLGTCQVQNLSHRLWQLMGPAGRQDSAPVDPSSPHSY

SEQ ID NO: 1341 - protein, 624 aa, Artificial Sequence
  Description of Artificial Sequence: Synthetic polypeptide
GSPAGSPTSTEEGTSESATPESGPGTSTEPSEGSAPGSPAGSPTSTEEGTSTEPSEGSAPGTSTEPSEGSAPGTSESATPESGPGSEPATSGSETPGSEPATSGSETPGSPAGSPTSTEEGTSESATPESGPGTSTEPSEGSAPGTSTEPSEGSAPGSPAGSPTSTEEGTSTEPSEGSAPGTSTEPSEGSAPGTSESATPESGPGTSTEPSEGSAPGTSESATPESGPGSEPATSGSETPGTSTEPSEGSAPGTSTEPSEGSAPGTSESATPESGPGTSESATPESGPGSPAGSPTSTEEGTSESATPESGPGSEPATSGSETPGTSESATPESGPGTSTEPSEGSAPGTSTEPSEGSAPGTSTEPSEGSAPGTSTEPSEGSAPGTSTEPSEGSAPGTSTEPSEGSAPGSPAGSPTSTEEGTSTEPSEGSAPGTSESATPESGPGSEPATSGSETPGTSESATPESGPGSEPATSGSETPGTSESATPESGPGTSTEPSEGSAPGTSESATPESGPGSPAGSPTSTEEGSPAGSPTSTEEGSPAGSPTSTEEGTSESATPESGPGTSTEPSEGSAPGTQAQLLRVGCVLGTCQVQNLSHRLWQLMGPAGRQDSAPVDPSSPHSY

SEQ ID NO: 1342 - protein, 624 aa, Artificial Sequence
  Description of Artificial Sequence: Synthetic polypeptide
GSTSSTAESPGPGSTSSTAESPGPGSTSESPSGTAPGSTSSTAESPGPGSTSSTAESPGPGTSTPESGSASPGSTSESPSGTAPGTSPSGESSTAPGSTSESPSGTAPGSTSESPSGTAPGTSPSGESSTAPGSTSESPSGTAPGSTSESPSGTAPGTSPSGESSTAPGSTSESPSGTAPGSTSESPSGTAPGSTSESPSGTAPGTSTPESGSASPGSTSESPSGTAPGTSTPESGSASPGSTSSTAESPGPGSTSSTAESPGPGTSTPESGSASPGTSTPESGSASPGSTSESPSGTAPGTSTPESGSASPGTSTPESGSASPGSTSESPSGTAPGSTSESPSGTAPGSTSESPSGTAPGSTSSTAESPGPGTSTPESGSASPGTSTPESGSASPGSTSESPSGTAPGSTSESPSGTAPGTSTPESGSASPGSTSESPSGTAPGSTSESPSGTAPGTSTPESGSASPGTSPSGESSTAPGSTSSTAESPGPGTSPSGESSTAPGSTSSTAESPGPGTSTPESGSASPGSTSESPSGTAPGSTSSTAESPGPGTSTPESGSASPGTSTPESGSASPGTQAQLLRVGCVLGTCQVQNLSHRLWQLMGPAGRQDSAPVDPSSPHSY

SEQ ID NO: 1343 - protein, 884 aa, Artificial Sequence
  Description of Artificial Sequence: Synthetic polypeptide
GSSESGSSEGGPGSSESGSSEGGPGESPGGSSGSESGSGGEPSESGSSGESPGGSSGSESGESPGGSSGSESGSSESGSSEGGPGSSESGSSEGGPGSSESGSSEGGPGESPGGSSGSESGESPGGSSGSESGESPGGSSGSESGSSESGSSEGGPGSSESGSSEGGPGSSESGSSEGGPGSSESGSSEGGPGSSESGSSEGGPGSSESGSSEGGPGSGGEPSESGSSGESPGGSSGSESGESPGGSSGSESGSGGEPSESGSSGSEGSSGPGESSGSSESGSSEGGPGSGGEPSESGSSGSEGSSGPGESSGSSESGSSEGGPGSGGEPSESGSSGESPGGSSGSESGSGGEPSESGSSGSGGEPSESGSSGSSESGSSEGGPGSGGEPSESGSSGSGGEPSESGSSGSEGSSGPGESSGESPGGSSGSESGSEGSSGPGESSGSEGSSGPGESSGSGGEPSESGSSGSSESGSSEGGPGSSESGSSEGGPGESPGGSSGSESGSGGEPSESGSSGSEGSSGPGESSGESPGGSSGSESGSEGSSGPGSSESGSSEGGPGSGGEPSESGSSGSEGSSGPGESSGSEGSSGPGESSGSEGSSGPGESSGSGGEPSESGSSGSGGEPSESGSSGESPGGSSGSESGESPGGSSGSESGSGGEPSESGSSGSEGSSGPGESSGESPGGSSGSESGSSESGSSEGGPGSSESGSSEGGPGSSESGSSEGGPGSGGEPSESGSSGSSESGSSEGGPGESPGGSSGSESGSGGEPSESGSSGSSESGSSEGGPGESPGGSSGSESGSGGEPSESGSSGESPGGSSGSESGSGGEPSESGSSGTQAQLLRVGCVLGTCQVQNLSHRLWQLMGPAGRQDSAPVDPSSPHSY

SEQ ID NO: 1344 - protein, 912 aa, Artificial Sequence
  Description of Artificial Sequence: Synthetic polypeptide
GSPAGSPTSTEEGTSESATPESGPGTSTEPSEGSAPGSPAGSPTSTEEGTSTEPSEGSAPGTSTEPSEGSAPGTSESATPESGPGSEPATSGSETPGSEPATSGSETPGSPAGSPTSTEEGTSESATPESGPGTSTEPSEGSAPGTSTEPSEGSAPGSPAGSPTSTEEGTSTEPSEGSAPGTSTEPSEGSAPGTSESATPESGPGTSTEPSEGSAPGTSESATPESGPGSEPATSGSETPGTSTEPSEGSAPGTSTEPSEGSAPGTSESATPESGPGTSESATPESGPGSPAGSPTSTEEGTSESATPESGPGSEPATSGSETPGTSESATPESGPGTSTEPSEGSAPGTSTEPSEGSAPGTSTEPSEGSAPGTSTEPSEGSAPGTSTEPSEGSAPGTSTEPSEGSAPGSPAGSPTSTEEGTSTEPSEGSAPGTSESATPESGPGSEPATSGSETPGTSESATPESGPGSEPATSGSETPGTSESATPESGPGTSTEPSEGSAPGTSESATPESGPGSPAGSPTSTEEGSPAGSPTSTEEGSPAGSPTSTEEGTSESATPESGPGTSTEPSEGSAPGTSESATPESGPGSEPATSGSETPGTSESATPESGPGSEPATSGSETPGTSESATPESGPGTSTEPSEGSAPGSPAGSPTSTEEGTSESATPESGPGSEPATSGSETPGTSESATPESGPGSPAGSPTSTEEGSPAGSPTSTEEGTSTEPSEGSAPGTSESATPESGPGTSESATPESGPGTSESATPESGPGSEPATSGSETPGSEPATSGSETPGSPAGSPTSTEEGTSTEPSEGSAPGTSTEPSEGSAPGSEPATSGSETPGTSESATPESGPGTSTEPSEGSAPGTQAQLLRVGCVLGTCQVQNLSHRLWQLMGPAGRQDSAPVDPSSPHSY

SEQ ID NO: 1345 - protein, 923 aa, Artificial Sequence
  Description of Artificial Sequence: Synthetic polypeptide
  MOD_RES (430)..(432): Any amino acid
  MOD_RES (443)..(446): Any amino acid
GSTSESPSGTAPGTSPSGESSTAPGSTSESPSGTAPGSTSESPSGTAPGTSTPESGSASPGTSTPESGSASPGSTSESPSGTAPGSTSESPSGTAPGTSPSGESSTAPGSTSESPSGTAPGTSPSGESSTAPGTSPSGESSTAPGSTSSTAESPGPGTSPSGESSTAPGTSPSGESSTAPGSTSSTAESPGPGTSTPESGSASPGTSTPESGSASPGSTSESPSGTAPGSTSESPSGTAPGTSTPESGSASPGSTSSTAESPGPGTSTPESGSASPGSTSESPSGTAPGTSPSGESSTAPGSTSSTAESPGPGTSPSGESSTAPGTSTPESGSASPGSTSSTAESPGPGSTSSTAESPGPGSTSSTAESPGPGSTSSTAESPGPGTSPSGESSTAPGSTSESPSGTAPGSTSESPSGTAPGTSTPESGPXXXGASASGAPSTXXXXSESPSGTAPGSTSESPSGTAPGSTSESPSGTAPGSTSESPSGTAPGSTSESPSGTAPGSTSESPSGTAPGTSTPESGSASPGTSPSGESSTAPGTSPSGESSTAPGSTSSTAESPGPGTSPSGESSTAPGTSTPESGSASPGSTSESPSGTAPGSTSESPSGTAPGTSPSGESSTAPGSTSESPSGTAPGTSTPESGSASPGTSTPESGSASPGSTSESPSGTAPGTSTPESGSASPGSTSSTAESPGPGSTSESPSGTAPGSTSESPSGTAPGTSPSGESSTAPGSTSSTAESPGPGTSPSGESSTAPGTSTPESGSASPGTSPSGESSTAPGTSPSGESSTAPGTSPSGESSTAPGSTSSTAESPGPGSTSSTAESPGPGTSPSGESSTAPGSSPSASTGTGPGSSTPSGATGSPGSSTPSGATGSPGTQAQLLRVGCVLGTCQVQNLSHRLWQLMGPAGRQDSAPVDPSSPHSY

SEQ ID NO: 1346 - protein, 912 aa, Artificial Sequence
  Description of Artificial Sequence: Synthetic polypeptide
GASPGTSSTGSPGSSPSASTGTGPGSSPSASTGTGPGTPGSGTASSSPGSSTPSGATGSPGSNPSASTGTGPGASPGTSSTGSPGTPGSGTASSSPGSSTPSGATGSPGTPGSGTASSSPGASPGTSSTGSPGASPGTSSTGSPGTPGSGTASSSPGSSTPSGATGSPGASPGTSSTGSPGTPGSGTASSSPGSSTPSGATGSPGSNPSASTGTGPGSSPSASTGTGPGSSTPSGATGSPGSSTPSGATGSPGASPGTSSTGSPGASPGTSSTGSPGASPGTSSTGSPGTPGSGTASSSPGASPGTSSTGSPGASPGTSSTGSPGASPGTSSTGSPGSSPSASTGTGPGTPGSGTASSSPGASPGTSSTGSPGASPGTSSTGSPGASPGTSSTGSPGSSTPSGATGSPGSSTPSGATGSPGASPGTSSTGSPGTPGSGTASSSPGSSTPSGATGSPGSSTPSGATGSPGSSTPSGATGSPGSSPSASTGTGPGASPGTSSTGSPGASPGTSSTGSPGTPGSGTASSSPGASPGTSSTGSPGASPGTSSTGSPGASPGTSSTGSPGASPGTSSTGSPGTPGSGTASSSPGSSTPSGATGSPGTPGSGTASSSPGSSTPSGATGSPGTPGSGTASSSPGSSTPSGATGSPGSSTPSGATGSPGSSPSASTGTGPGSSPSASTGTGPGASPGTSSTGSPGTPGSGTASSSPGSSTPSGATGSPGSSPSASTGTGPGSSPSASTGTGPGASPGTSSTGSPGASPGTSSTGSPGSSTPSGATGSPGSSPSASTGTGPGASPGTSSTGSPGSSPSASTGTGPGTPGSGTASSSPGSSTPSGATGSPGSSTPSGATGSPGASPGTSSTGSPGTQAQLLRVGCVLGTCQVQNLSHRLWQLMGPAGRQDSAPVDPSSPHSY

SEQ ID NO: 1347 - protein, 923 aa, Artificial Sequence
  Description of Artificial Sequence: Synthetic polypeptide
GTSTEPSEGSAPGSEPATSGSETPGSPAGSPTSTEEGSTSSTAESPGPGTSTPESGSASPGSTSESPSGTAPGSTSESPSGTAPGTSTPESGSASPGTSTPESGSASPGSEPATSGSETPGTSESATPESGPGSPAGSPTSTEEGTSTEPSEGSAPGTSESATPESGPGTSTEPSEGSAPGTSTEPSEGSAPGSPAGSPTSTEEGTSTEPSEGSAPGTSTEPSEGSAPGTSESATPESGPGTSESATPESGPGTSTEPSEGSAPGTSTEPSEGSAPGTSESATPESGPGTSTEPSEGSAPGSEPATSGSETPGSPAGSPTSTEEGSSTPSGATGSPGTPGSGTASSSPGSSTPSGATGSPGTSTEPSEGSAPGTSTEPSEGSAPGSEPATSGSETPGSPAGSPTSTEEGSPAGSPTSTEEGTSTEPSEGSAPGASASGAPSTGGTSESATPESGPGSPAGSPTSTEEGSPAGSPTSTEEGSTSSTAESPGPGSTSESPSGTAPGTSPSGESSTAPGTPGSGTASSSPGSSTPSGATGSPGSSPSASTGTGPGSEPATSGSETPGTSESATPESGPGSEPATSGSETPGSTSSTAESPGPGSTSSTAESPGPGTSPSGESSTAPGSEPATSGSETPGSEPATSGSETPGTSTEPSEGSAPGSTSSTAESPGPGTSTPESGSASPGSTSESPSGTAPGTSTEPSEGSAPGTSTEPSEGSAPGTSTEPSEGSAPGSSTPSGATGSPGSSPSASTGTGPGASPGTSSTGSPGSEPATSGSETPGTSESATPESGPGSPAGSPTSTEEGSSTPSGATGSPGSSPSASTGTGPGASPGTSSTGSPGTSESATPESGPGTSTEPSEGSAPGTSTEPSEGSAPGTQAQLLRVGCVLGTCQVQNLSHRLWQLMGPAGRQDSAPVDPSSPHSY

SEQ ID NO: 1348 - protein, 291 aa, Artificial Sequence
  Description of Artificial Sequence: Synthetic polypeptide
VPIQKVQDDTKTLIKTIVTRINDISHTQSVSSKQKVTGLDFIPGLHPILTLSKMDQTLAVYQQILTSMPSRNVIQISNDLENLRDLLHVLAFSKSCHLPWASGLETLDSLGGVLEASGYSTEVVALSRLQGSLQDMLWQLDLSPGCGGSEPATSGSETPGTSESATPESGPGSEPATSGSETPGSPAGSPTSTEEGTSTEPSEGSAPGSEPATSGSETPGSEPATSGSETPGSEPATSGSETPGTSTEPSEGSAPGTSESATPESGPGSEPATSGSETPGTSTEPSEGSAP

SEQ ID NO: 1349 - protein, 291 aa, Artificial Sequence
  Description of Artificial Sequence: Synthetic polypeptide
VPIQKVQDDTKTLIKTIVTRINDISHTQSVSSKQKVTGLDFIPGLHPILTLSKMDQTLAVYQQILTSMPSRNVIQISNDLENLRDLLHVLAFSKSCHLPWASGLETLDSLGGVLEASGYSTEVVALSRLQGSLQDMLWQLDLSPGCGGTSTPESGSASPGTSPSGESSTAPGTSPSGESSTAPGSTSSTAESPGPGSTSESPSGTAPGSTSSTAESPGPGTSPSGESSTAPGTSTPESGSASPGSTSSTAESPGPGTSPSGESSTAPGTSPSGESSTAPGTSPSGESSTAP

SEQ ID NO: 1350 - protein, 435 aa, Artificial Sequence
  Description of Artificial Sequence: Synthetic polypeptide
VPIQKVQDDTKTLIKTIVTRINDISHTQSVSSKQKVTGLDFIPGLHPILTLSKMDQTLAVYQQILTSMPSRNVIQISNDLENLRDLLHVLAFSKSCHLPWASGLETLDSLGGVLEASGYSTEVVALSRLQGSLQDMLWQLDLSPGCGGTSESATPESGPGSEPATSGSETPGTSESATPESGPGSEPATSGSETPGTSESATPESGPGTSTEPSEGSAPGSPAGSPTSTEEGTSESATPESGPGSEPATSGSETPGTSESATPESGPGSPAGSPTSTEEGSPAGSPTSTEEGTSTEPSEGSAPGTSESATPESGPGTSESATPESGPGTSESATPESGPGSEPATSGSETPGSEPATSGSETPGSPAGSPTSTEEGTSTEPSEGSAPGTSTEPSEGSAPGSEPATSGSETPGTSESATPESGPGTSTEPSEGSAP

SEQ ID NO: 1351 - protein, 723 aa, Artificial Sequence
  Description of Artificial Sequence: Synthetic polypeptide
VPIQKVQDDTKTLIKTIVTRINDISHTQSVSSKQKVTGLDFIPGLHPILTLSKMDQTLAVYQQILTSMPSRNVIQISNDLENLRDLLHVLAFSKSCHLPWASGLETLDSLGGVLEASGYSTEVVALSRLQGSLQDMLWQLDLSPGCGGSPAGSPTSTEEGTSESATPESGPGTSTEPSEGSAPGSPAGSPTSTEEGTSTEPSEGSAPGTSTEPSEGSAPGTSESATPESGPGSEPATSGSETPGSEPATSGSETPGSPAGSPTSTEEGTSESATPESGPGTSTEPSEGSAPGTSTEPSEGSAPGSPAGSPTSTEEGTSTEPSEGSAPGTSTEPSEGSAPGTSESATPESGPGTSTEPSEGSAPGTSESATPESGPGSEPATSGSETPGTSTEPSEGSAPGTSTEPSEGSAPGTSESATPESGPGTSESATPESGPGSPAGSPTSTEEGTSESATPESGPGSEPATSGSETPGTSESATPESGPGTSTEPSEGSAPGTSTEPSEGSAPGTSTEPSEGSAPGTSTEPSEGSAPGTSTEPSEGSAPGTSTEPSEGSAPGSPAGSPTSTEEGTSTEPSEGSAPGTSESATPESGPGSEPATSGSETPGTSESATPESGPGSEPATSGSETPGTSESATPESGPGTSTEPSEGSAPGTSESATPESGPGSPAGSPTSTEEGSPAGSPTSTEEGSPAGSPTSTEEGTSESATPESGPGTSTEPSEGSAP

SEQ ID NO: 1352 - protein, 723 aa, Artificial Sequence
  Description of Artificial Sequence: Synthetic polypeptide
VPIQKVQDDTKTLIKTIVTRINDISHTQSVSSKQKVTGLDFIPGLHPILTLSKMDQTLAVYQQILTSMPSRNVIQISNDLENLRDLLHVLAFSKSCHLPWASGLETLDSLGGVLEASGYSTEVVALSRLQGSLQDMLWQLDLSPGCGGSTSSTAESPGPGSTSSTAESPGPGSTSESPSGTAPGSTSSTAESPGPGSTSSTAESPGPGTSTPESGSASPGSTSESPSGTAPGTSPSGESSTAPGSTSESPSGTAPGSTSESPSGTAPGTSPSGESSTAPGSTSESPSGTAPGSTSESPSGTAPGTSPSGESSTAPGSTSESPSGTAPGSTSESPSGTAPGSTSESPSGTAPGTSTPESGSASPGSTSESPSGTAPGTSTPESGSASPGSTSSTAESPGPGSTSSTAESPGPGTSTPESGSASPGTSTPESGSASPGSTSESPSGTAPGTSTPESGSASPGTSTPESGSASPGSTSESPSGTAPGSTSESPSGTAPGSTSESPSGTAPGSTSSTAESPGPGTSTPESGSASPGTSTPESGSASPGSTSESPSGTAPGSTSESPSGTAPGTSTPESGSASPGSTSESPSGTAPGSTSESPSGTAPGTSTPESGSASPGTSPSGESSTAPGSTSSTAESPGPGTSPSGESSTAPGSTSSTAESPGPGTSTPESGSASPGSTSESPSGTAPGSTSSTAESPGPGTSTPESGSASPGTSTPESGSASP

SEQ ID NO: 1353 - protein, 983 aa, Artificial Sequence
  Description of Artificial Sequence: Synthetic polypeptide
VPIQKVQDDTKTLIKTIVTRINDISHTQSVSSKQKVTGLDFIPGLHPILTLSKMDQTLAVYQQILTSMPSRNVIQISNDLENLRDLLHVLAFSKSCHLPWASGLETLDSLGGVLEASGYSTEVVALSRLQGSLQDMLWQLDLSPGCGGSSESGSSEGGPGSSESGSSEGGPGESPGGSSGSESGSGGEPSESGSSGESPGGSSGSESGESPGGSSGSESGSSESGSSEGGPGSSESGSSEGGPGSSESGSSEGGPGESPGGSSGSESGESPGGSSGSESGESPGGSSGSESGSSESGSSEGGPGSSESGSSEGGPGSSESGSSEGGPGSSESGSSEGGPGSSESGSSEGGPGSSESGSSEGGPGSGGEPSESGSSGESPGGSSGSESGESPGGSSGSESGSGGEPSESGSSGSEGSSGPGESSGSSESGSSEGGPGSGGEPSESGSSGSEGSSGPGESSGSSESGSSEGGPGSGGEPSESGSSGESPGGSSGSESGSGGEPSESGSSGSGGEPSESGSSGSSESGSSEGGPGSGGEPSESGSSGSGGEPSESGSSGSEGSSGPGESSGESPGGSSGSESGSEGSSGPGESSGSEGSSGPGESSGSGGEPSESGSSGSSESGSSEGGPGSSESGSSEGGPGESPGGSSGSESGSGGEPSESGSSGSEGSSGPGESSGESPGGSSGSESGSEGSSGPGSSESGSSEGGPGSGGEPSESGSSGSEGSSGPGESSGSEGSSGPGESSGSEGSSGPGESSGSGGEPSESGSSGSGGEPSESGSSGESPGGSSGSESGESPGGSSGSESGSGGEPSESGSSGSEGSSGPGESSGESPGGSSGSESGSSESGSSEGGPGSSESGSSEGGPGSSESGSSEGGPGSGGEPSESGSSGSSESGSSEGGPGESPGGSSGSESGSGGEPSESGSSGSSESGSSEGGPGESPGGSSGSESGSGGEPSESGSSGESPGGSSGSESGSGGEPSESGSS

SEQ ID NO: 1354 - protein, 1011 aa, Artificial Sequence
  Description of Artificial Sequence: Synthetic polypeptide
VPIQKVQDDTKTLIKTIVTRINDISHTQSVSSKQKVTGLDFIPGLHPILTLSKMDQTLAVYQQILTSMPSRNVIQISNDLENLRDLLHVLAFSKSCHLPWASGLETLDSLGGVLEASGYSTEVVALSRLQGSLQDMLWQLDLSPGCGGSPAGSPTSTEEGTSESATPESGPGTSTEPSEGSAPGSPAGSPTSTEEGTSTEPSEGSAPGTSTEPSEGSAPGTSESATPESGPGSEPATSGSETPGSEPATSGSETPGSPAGSPTSTEEGTSESATPESGPGTSTEPSEGSAPGTSTEPSEGSAPGSPAGSPTSTEEGTSTEPSEGSAPGTSTEPSEGSAPGTSESATPESGPGTSTEPSEGSAPGTSESATPESGPGSEPATSGSETPGTSTEPSEGSAPGTSTEPSEGSAPGTSESATPESGPGTSESATPESGPGSPAGSPTSTEEGTSESATPESGPGSEPATSGSETPGTSESATPESGPGTSTEPSEGSAPGTSTEPSEGSAPGTSTEPSEGSAPGTSTEPSEGSAPGTSTEPSEGSAPGTSTEPSEGSAPGSPAGSPTSTEEGTSTEPSEGSAPGTSESATPESGPGSEPATSGSETPGTSESATPESGPGSEPATSGSETPGTSESATPESGPGTSTEPSEGSAPGTSESATPESGPGSPAGSPTSTEEGSPAGSPTSTEEGSPAGSPTSTEEGTSESATPESGPGTSTEPSEGSAPGTSESATPESGPGSEPATSGSETPGTSESATPESGPGSEPATSGSETPGTSESATPESGPGTSTEPSEGSAPGSPAGSPTSTEEGTSESATPESGPGSEPATSGSETPGTSESATPESGPGSPAGSPTSTEEGSPAGSPTSTEEGTSTEPSEGSAPGTSESATPESGPGTSESATPESGPGTSESATPESGPGSEPATSGSETPGSEPATSGSETPGSPAGSPTSTEEGTSTEPSEGSAPGTSTEPSEGSAPGSEPATSGSETPGTSESATPESGPGTSTEPSEGSAP

SEQ ID NO: 1355 - protein, 1022 aa, Artificial Sequence
  Description of Artificial Sequence: Synthetic polypeptide
  MOD_RES (577)..(579): Any amino acid
  MOD_RES (590)..(593): Any amino acid
VPIQKVQDDTKTLIKTIVTRINDISHTQSVSSKQKVTGLDFIPGLHPILTLSKMDQTLAVYQQILTSMPSRNVIQISNDLENLRDLLHVLAFSKSCHLPWASGLETLDSLGGVLEASGYSTEVVALSRLQGSLQDMLWQLDLSPGCGGSTSESPSGTAPGTSPSGESSTAPGSTSESPSGTAPGSTSESPSGTAPGTSTPESGSASPGTSTPESGSASPGSTSESPSGTAPGSTSESPSGTAPGTSPSGESSTAPGSTSESPSGTAPGTSPSGESSTAPGTSPSGESSTAPGSTSSTAESPGPGTSPSGESSTAPGTSPSGESSTAPGSTSSTAESPGPGTSTPESGSASPGTSTPESGSASPGSTSESPSGTAPGSTSESPSGTAPGTSTPESGSASPGSTSSTAESPGPGTSTPESGSASPGSTSESPSGTAPGTSPSGESSTAPGSTSSTAESPGPGTSPSGESSTAPGTSTPESGSASPGSTSSTAESPGPGSTSSTAESPGPGSTSSTAESPGPGSTSSTAESPGPGTSPSGESSTAPGSTSESPSGTAPGSTSESPSGTAPGTSTPESGPXXXGASASGAPSTXXXXSESPSGTAPGSTSESPSGTAPGSTSESPSGTAPGSTSESPSGTAPGSTSESPSGTAPGSTSESPSGTAPGTSTPESGSASPGTSPSGESSTAPGTSPSGESSTAPGSTSSTAESPGPGTSPSGESSTAPGTSTPESGSASPGSTSESPSGTAPGSTSESPSGTAPGTSPSGESSTAPGSTSESPSGTAPGTSTPESGSASPGTSTPESGSASPGSTSESPSGTAPGTSTPESGSASPGSTSSTAESPGPGSTSESPSGTAPGSTSESPSGTAPGTSPSGESSTAPGSTSSTAESPGPGTSPSGESSTAPGTSTPESGSASPGTSPSGESSTAPGTSPSGESSTAPGTSPSGESSTAPGSTSSTAESPGPGSTSSTAESPGPGTSPSGESSTAPGSSPSASTGTGPGSSTPSGATGSPGSSTPSGATGSP

SEQ ID NO: 1356 - protein, 1011 aa, Artificial Sequence
  Description of Artificial Sequence: Synthetic polypeptide
VPIQKVQDDTKTLIKTIVTRINDISHTQSVSSKQKVTGLDFIPGLHPILTLSKMDQTLAVYQQILTSMPSRNVIQISNDLENLRDLLHVLAFSKSCHLPWASGLETLDSLGGVLEASGYSTEVVALSRLQGSLQDMLWQLDLSPGCGGASPGTSSTGSPGSSPSASTGTGPGSSPSASTGTGPGTPGSGTASSSPGSSTPSGATGSPGSNPSASTGTGPGASPGTSSTGSPGTPGSGTASSSPGSSTPSGATGSPGTPGSGTASSSPGASPGTSSTGSPGASPGTSSTGSPGTPGSGTASSSPGSSTPSGATGSPGASPGTSSTGSPGTPGSGTASSSPGSSTPSGATGSPGSNPSASTGTGPGSSPSASTGTGPGSSTPSGATGSPGSSTPSGATGSPGASPGTSSTGSPGASPGTSSTGSPGASPGTSSTGSPGTPGSGTASSSPGASPGTSSTGSPGASPGTSSTGSPGASPGTSSTGSPGSSPSASTGTGPGTPGSGTASSSPGASPGTSSTGSPGASPGTSSTGSPGASPGTSSTGSPGSSTPSGATGSPGSSTPSGATGSPGASPGTSSTGSPGTPGSGTASSSPGSSTPSGATGSPGSSTPSGATGSPGSSTPSGATGSPGSSPSASTGTGPGASPGTSSTGSPGASPGTSSTGSPGTPGSGTASSSPGASPGTSSTGSPGASPGTSSTGSPGASPGTSSTGSPGASPGTSSTGSPGTPGSGTASSSPGSSTPSGATGSPGTPGSGTASSSPGSSTPSGATGSPGTPGSGTASSSPGSSTPSGATGSPGSSTPSGATGSPGSSPSASTGTGPGSSPSASTGTGPGASPGTSSTGSPGTPGSGTASSSPGSSTPSGATGSPGSSPSASTGTGPGSSPSASTGTGPGASPGTSSTGSPGASPGTSSTGSPGSSTPSGATGSPGSSPSASTGTGPGASPGTSSTGSPGSSPSASTGTGPGTPGSGTASSSPGSSTPSGATGSPGSSTPSGATGSPGASPGTSSTGSP

SEQ ID NO: 1357 - protein, 1022 aa, Artificial Sequence
  Description of Artificial Sequence: Synthetic polypeptide
VPIQKVQDDTKTLIKTIVTRINDISHTQSVSSKQKVTGLDFIPGLHPILTLSKMDQTLAVYQQILTSMPSRNVIQISNDLENLRDLLHVLAFSKSCHLPWASGLETLDSLGGVLEASGYSTEVVALSRLQGSLQDMLWQLDLSPGCGGTSTEPSEGSAPGSEPATSGSETPGSPAGSPTSTEEGSTSSTAESPGPGTSTPESGSASPGSTSESPSGTAPGSTSESPSGTAPGTSTPESGSASPGTSTPESGSASPGSEPATSGSETPGTSESATPESGPGSPAGSPTSTEEGTSTEPSEGSAPGTSESATPESGPGTSTEPSEGSAPGTSTEPSEGSAPGSPAGSPTSTEEGTSTEPSEGSAPGTSTEPSEGSAPGTSESATPESGPGTSESATPESGPGTSTEPSEGSAPGTSTEPSEGSAPGTSESATPESGPGTSTEPSEGSAPGSEPATSGSETPGSPAGSPTSTEEGSSTPSGATGSPGTPGSGTASSSPGSSTPSGATGSPGTSTEPSEGSAPGTSTEPSEGSAPGSEPATSGSETPGSPAGSPTSTEEGSPAGSPTSTEEGTSTEPSEGSAPGASASGAPSTGGTSESATPESGPGSPAGSPTSTEEGSPAGSPTSTEEGSTSSTAESPGPGSTSESPSGTAPGTSPSGESSTAPGTPGSGTASSSPGSSTPSGATGSPGSSPSASTGTGPGSEPATSGSETPGTSESATPESGPGSEPATSGSETPGSTSSTAESPGPGSTSSTAESPGPGTSPSGESSTAPGSEPATSGSETPGSEPATSGSETPGTSTEPSEGSAPGSTSSTAESPGPGTSTPESGSASPGSTSESPSGTAPGTSTEPSEGSAPGTSTEPSEGSAPGTSTEPSEGSAPGSSTPSGATGSPGSSPSASTGTGPGASPGTSSTGSPGSEPATSGSETPGTSESATPESGPGSPAGSPTSTEEGSSTPSGATGSPGSSPSASTGTGPGASPGTSSTGSPGTSESATPESGPGTSTEPSEGSAPGTSTEPSEGSAP

SEQ ID NO: 1358 - protein, 1465 aa, Artificial Sequence
  Description of Artificial Sequence: Synthetic polypeptide
VPIQKVQDDTKTLIKTIVTRINDISHTQSVSSKQKVTGLDFIPGLHPILTLSKMDQTLAVYQQILTSMPSRNVIQISNDLENLRDLLHVLAFSKSCHLPWASGLETLDSLGGVLEASGYSTEVVALSRLQGSLQDMLWQLDLSPGCGGTSTEPSEGSAPGSEPATSGSETPGSPAGSPTSTEEGSTSSTAESPGPGTSTPESGSASPGSTSESPSGTAPGSTSESPSGTAPGTSTPESGSASPGTSTPESGSASPGSEPATSGSETPGTSESATPESGPGSPAGSPTSTEEGTSTEPSEGSAPGTSESATPESGPGTSTEPSEGSAPGTSTEPSEGSAPGSPAGSPTSTEEGTSTEPSEGSAPGTSTEPSEGSAPGTSESATPESGPGTSESATPESGPGTSTEPSEGSAPGTSTEPSEGSAPGTSESATPESGPGTSTEPSEGSAPGSEPATSGSETPGSPAGSPTSTEEGSSTPSGATGSPGTPGSGTASSSPGSSTPSGATGSPGTSTEPSEGSAPGTSTEPSEGSAPGSEPATSGSETPGSPAGSPTSTEEGSPAGSPTSTEEGTSTEPSEGSAPGPEPTGPAPSGGSEPATSGSETPGTSESATPESGPGSPAGSPTSTEEGTSESATPESGPGSPAGSPTSTEEGSPAGSPTSTEEGTSESATPESGPGSPAGSPTSTEEGSPAGSPTSTEEGSTSSTAESPGPGSTSESPSGTAPGTSPSGESSTAPGSTSESPSGTAPGSTSESPSGTAPGTSPSGESSTAPGTSTEPSEGSAPGTSESATPESGPGTSESATPESGPGSEPATSGSETPGTSESATPESGPGTSESATPESGPGTSTEPSEGSAPGTSESATPESGPGTSTEPSEGSAPGTSPSGESSTAPGTSPSGESSTAPGTSPSGESSTAPGTSTEPSEGSAPGSPAGSPTSTEEGTSTEPSEGSAPGSSPSASTGTGPGSSTPSGATGSPGSSTPSGATGSPGSSTPSGATGSPGSSTPSGATGSPGASPGTSSTGSPGASASGAPSTGGTSPSGESSTAPGSTSSTAESPGPGTSPSGESSTAPGTSESATPESGPGTSTEPSEGSAPGTSTEPSEGSAPGSSPSASTGTGPGSSTPSGATGSPGASPGTSSTGSPGTSTPESGSASPGTSPSGESSTAPGTSPSGESSTAPGTSESATPESGPGSEPATSGSETPGTSTEPSEGSAPGSTSESPSGTAPGSTSESPSGTAPGTSTPESGSASPGSPAGSPTSTEEGTSESATPESGPGTSTEPSEGSAPGSPAGSPTSTEEGTSESATPESGPGSEPATSGSETPGSSTPSGATGSPGASPGTSSTGSPGSSTPSGATGSPGSTSESPSGTAPGTSPSGESSTAPGSTSSTAESPGPGSSTPSGATGSPGASPGTSSTGSPGTPGSGTASSSPGSPAGSPTSTEEGSPAGSPTSTEEGTSTEPSEGSAP

SEQ ID NO: 1359 - protein, 1060 aa, Artificial Sequence
  Description of Artificial Sequence: Synthetic polypeptide
MAEPAGSPTSTEEGTPGSGTASSSPGSSTPSGATGSPGASPGTSSTGSPGSPAGSPTSTEEGTSESATPESGPGTSTEPSEGSAPGSPAGSPTSTEEGTSTEPSEGSAPGTSTEPSEGSAPGTSESATPESGPGSEPATSGSETPGSEPATSGSETPGSPAGSPTSTEEGTSESATPESGPGTSTEPSEGSAPGTSTEPSEGSAPGSPAGSPTSTEEGTSTEPSEGSAPGTSTEPSEGSAPGTSESATPESGPGTSTEPSEGSAPGTSESATPESGPGSEPATSGSETPGTSTEPSEGSAPGTSTEPSEGSAPGTSESATPESGPGTSESATPESGPGSPAGSPTSTEEGTSESATPESGPGSEPATSGSETPGTSESATPESGPGTSTEPSEGSAPGTSTEPSEGSAPGTSTEPSEGSAPGTSTEPSEGSAPGTSTEPSEGSAPGTSTEPSEGSAPGSPAGSPTSTEEGTSTEPSEGSAPGTSESATPESGPGSEPATSGSETPGTSESATPESGPGSEPATSGSETPGTSESATPESGPGTSTEPSEGSAPGTSESATPESGPGSPAGSPTSTEEGSPAGSPTSTEEGSPAGSPTSTEEGTSESATPESGPGTSTEPSEGSAPGTSESATPESGPGSEPATSGSETPGTSESATPESGPGSEPATSGSETPGTSESATPESGPGTSTEPSEGSAPGSPAGSPTSTEEGTSESATPESGPGSEPATSGSETPGTSESATPESGPGSPAGSPTSTEEGSPAGSPTSTEEGTSTEPSEGSAPGTSESATPESGPGTSESATPESGPGTSESATPESGPGSEPATSGSETPGSEPATSGSETPGSPAGSPTSTEEGTSTEPSEGSAPGTSTEPSEGSAPGSEPATSGSETPGTSESATPESGPGTSTEPSEGSAPGVPIQKVQDDTKTLIKTIVTRINDISHTQSVSSKQKVTGLDFIPGLHPILTLSKMDQTLAVYQQILTSMPSRNVIQISNDLENLRDLLHVLAFSKSCHLPWASGLETLDSLGGVLEASGYSTEVVALSRLQGSLQDMLWQLDLSPGC

SEQ ID NO: 1360 - protein, 1071 aa, Artificial Sequence
  Description of Artificial Sequence: Synthetic polypeptide
MAEPAGSPTSTEEGASPGTSSTGSPGSSTPSGATGSPGSSTPSGATGSPGTSTEPSEGSAPGSEPATSGSETPGSPAGSPTSTEEGSTSSTAESPGPGTSTPESGSASPGSTSESPSGTAPGSTSESPSGTAPGTSTPESGSASPGTSTPESGSASPGSEPATSGSETPGTSESATPESGPGSPAGSPTSTEEGTSTEPSEGSAPGTSESATPESGPGTSTEPSEGSAPGTSTEPSEGSAPGSPAGSPTSTEEGTSTEPSEGSAPGTSTEPSEGSAPGTSESATPESGPGTSESATPESGPGTSTEPSEGSAPGTSTEPSEGSAPGTSESATPESGPGTSTEPSEGSAPGSEPATSGSETPGSPAGSPTSTEEGSSTPSGATGSPGTPGSGTASSSPGSSTPSGATGSPGTSTEPSEGSAPGTSTEPSEGSAPGSEPATSGSETPGSPAGSPTSTEEGSPAGSPTSTEEGTSTEPSEGSAPGASASGAPSTGGTSESATPESGPGSPAGSPTSTEEGSPAGSPTSTEEGSTSSTAESPGPGSTSESPSGTAPGTSPSGESSTAPGTPGSGTASSSPGSSTPSGATGSPGSSPSASTGTGPGSEPATSGSETPGTSESATPESGPGSEPATSGSETPGSTSSTAESPGPGSTSSTAESPGPGTSPSGESSTAPGSEPATSGSETPGSEPATSGSETPGTSTEPSEGSAPGSTSSTAESPGPGTSTPESGSASPGSTSESPSGTAPGTSTEPSEGSAPGTSTEPSEGSAPGTSTEPSEGSAPGSSTPSGATGSPGSSPSASTGTGPGASPGTSSTGSPGSEPATSGSETPGTSESATPESGPGSPAGSPTSTEEGSSTPSGATGSPGSSPSASTGTGPGASPGTSSTGSPGTSESATPESGPGTSTEPSEGSAPGTSTEPSEGSAPGVPIQKVQDDTKTLIKTIVTRINDISHTQSVSSKQKVTGLDFIPGLHPILTLSKMDQTLAVYQQILTSMPSRNVIQISNDLENLRDLLHVLAFSKSCHLPWASGLETLDSLGGVLEASGYSTEVVALSRLQGSLQDMLWQLDLSPGC

SEQ ID NO: 1361 - protein, 291 aa, Artificial Sequence
  Description of Artificial Sequence: Synthetic polypeptide
GSEPATSGSETPGTSESATPESGPGSEPATSGSETPGSPAGSPTSTEEGTSTEPSEGSAPGSEPATSGSETPGSEPATSGSETPGSEPATSGSETPGTSTEPSEGSAPGTSESATPESGPGSEPATSGSETPGTSTEPSEGSAPGVPIQKVQDDTKTLIKTIVTRINDISHTQSVSSKQKVTGLDFIPGLHPILTLSKMDQTLAVYQQILTSMPSRNVIQISNDLENLRDLLHVLAFSKSCHLPWASGLETLDSLGGVLEASGYSTEVVALSRLQGSLQDMLWQLDLSPGC

SEQ ID NO: 1362 - protein, 291 aa, Artificial Sequence
  Description of Artificial Sequence: Synthetic polypeptide
GTSTPESGSASPGTSPSGESSTAPGTSPSGESSTAPGSTSSTAESPGPGSTSESPSGTAPGSTSSTAESPGPGTSPSGESSTAPGTSTPESGSASPGSTSSTAESPGPGTSPSGESSTAPGTSPSGESSTAPGTSPSGESSTAPGVPIQKVQDDTKTLIKTIVTRINDISHTQSVSSKQKVTGLDFIPGLHPILTLSKMDQTLAVYQQILTSMPSRNVIQISNDLENLRDLLHVLAFSKSCHLPWASGLETLDSLGGVLEASGYSTEVVALSRLQGSLQDMLWQLDLSPGC

SEQ ID NO: 1363 - protein, 435 aa, Artificial Sequence
  Description of Artificial Sequence: Synthetic polypeptide
GTSESATPESGPGSEPATSGSETPGTSESATPESGPGSEPATSGSETPGTSESATPESGPGTSTEPSEGSAPGSPAGSPTSTEEGTSESATPESGPGSEPATSGSETPGTSESATPESGPGSPAGSPTSTEEGSPAGSPTSTEEGTSTEPSEGSAPGTSESATPESGPGTSESATPESGPGTSESATPESGPGSEPATSGSETPGSEPATSGSETPGSPAGSPTSTEEGTSTEPSEGSAPGTSTEPSEGSAPGSEPATSGSETPGTSESATPESGPGTSTEPSEGSAPGVPIQKVQDDTKTLIKTIVTRINDISHTQSVSSKQKVTGLDFIPGLHPILTLSKMDQTLAVYQQILTSMPSRNVIQISNDLENLRDLLHVLAFSKSCHLPWASGLETLDSLGGVLEASGYSTEVVALSRLQGSLQDMLWQLDLSPGC

SEQ ID NO: 1364 - protein, 723 aa, Artificial Sequence
  Description of Artificial Sequence: Synthetic polypeptide
GSPAGSPTSTEEGTSESATPESGPGTSTEPSEGSAPGSPAGSPTSTEEGTSTEPSEGSAPGTSTEPSEGSAPGTSESATPESGPGSEPATSGSETPGSEPATSGSETPGSPAGSPTSTEEGTSESATPESGPGTSTEPSEGSAPGTSTEPSEGSAPGSPAGSPTSTEEGTSTEPSEGSAPGTSTEPSEGSAPGTSESATPESGPGTSTEPSEGSAPGTSESATPESGPGSEPATSGSETPGTSTEPSEGSAPGTSTEPSEGSAPGTSESATPESGPGTSESATPESGPGSPAGSPTSTEEGTSESATPESGPGSEPATSGSETPGTSESATPESGPGTSTEPSEGSAPGTSTEPSEGSAPGTSTEPSEGSAPGTSTEPSEGSAPGTSTEPSEGSAPGTSTEPSEGSAPGSPAGSPTSTEEGTSTEPSEGSAPGTSESATPESGPGSEPATSGSETPGTSESATPESGPGSEPATSGSETPGTSESATPESGPGTSTEPSEGSAPGTSESATPESGPGSPAGSPTSTEEGSPAGSPTSTEEGSPAGSPTSTEEGTSESATPESGPGTSTEPSEGSAPGVPIQKVQDDTKTLIKTIVTRINDISHTQSVSSKQKVTGLDFIPGLHPILTLSKMDQTLAVYQQILTSMPSRNVIQISNDLENLRDLLHVLAFSKSCHLPWASGLETLDSLGGVLEASGYSTEVVALSRLQGSLQDMLWQLDLSPGC

SEQ ID NO: 1365 - protein, 723 aa, Artificial Sequence
  Description of Artificial Sequence: Synthetic polypeptide
GSTSSTAESPGPGSTSSTAESPGPGSTSESPSGTAPGSTSSTAESPGPGSTSSTAESPGPGTSTPESGSASPGSTSESPSGTAPGTSPSGESSTAPGSTSESPSGTAPGSTSESPSGTAPGTSPSGESSTAPGSTSESPSGTAPGSTSESPSGTAPGTSPSGESSTAPGSTSESPSGTAPGSTSESPSGTAPGSTSESPSGTAPGTSTPESGSASPGSTSESPSGTAPGTSTPESGSASPGSTSSTAESPGPGSTSSTAESPGPGTSTPESGSASPGTSTPESGSASPGSTSESPSGTAPGTSTPESGSASPGTSTPESGSASPGSTSESPSGTAPGSTSESPSGTAPGSTSESPSGTAPGSTSSTAESPGPGTSTPESGSASPGTSTPESGSASPGSTSESPSGTAPGSTSESPSGTAPGTSTPESGSASPGSTSESPSGTAPGSTSESPSGTAPGTSTPESGSASPGTSPSGESSTAPGSTSSTAESPGPGTSPSGESSTAPGSTSSTAESPGPGTSTPESGSASPGSTSESPSGTAPGSTSSTAESPGPGTSTPESGSASPGTSTPESGSASPGVPIQKVQDDTKTLIKTIVTRINDISHTQSVSSKQKVTGLDFIPGLHPILTLSKMDQTLAVYQQILTSMPSRNVIQISNDLENLRDLLHVLAFSKSCHLPWASGLETLDSLGGVLEASGYSTEVVALSRLQGSLQDMLWQLDLSPGC

SEQ ID NO: 1366 - protein, 983 aa, Artificial Sequence
  Description of Artificial Sequence: Synthetic polypeptide
GSSESGSSEGGPGSSESGSSEGGPGESPGGSSGSESGSGGEPSESGSSGESPGGSSGSESGESPGGSSGSESGSSESGSSEGGPGSSESGSSEGGPGSSESGSSEGGPGESPGGSSGSESGESPGGSSGSESGESPGGSSGSESGSSESGSSEGGPGSSESGSSEGGPGSSESGSSEGGPGSSESGSSEGGPGSSESGSSEGGPGSSESGSSEGGPGSGGEPSESGSSGESPGGSSGSESGESPGGSSGSESGSGGEPSESGSSGSEGSSGPGESSGSSESGSSEGGPGSGGEPSESGSSGSEGSSGPGESSGSSESGSSEGGPGSGGEPSESGSSGESPGGSSGSESGSGGEPSESGSSGSGGEPSESGSSGSSESGSSEGGPGSGGEPSESGSSGSGGEPSESGSSGSEGSSGPGESSGESPGGSSGSESGSEGSSGPGESSGSEGSSGPGESSGSGGEPSESGSSGSSESGSSEGGPGSSESGSSEGGPGESPGGSSGSESGSGGEPSESGSSGSEGSSGPGESSGESPGGSSGSESGSEGSSGPGSSESGSSEGGPGSGGEPSESGSSGSEGSSGPGESSGSEGSSGPGESSGSEGSSGPGESSGSGGEPSESGSSGSGGEPSESGSSGESPGGSSGSESGESPGGSSGSESGSGGEPSESGSSGSEGSSGPGESSGESPGGSSGSESGSSESGSSEGGPGSSESGSSEGGPGSSESGSSEGGPGSGGEPSESGSSGSSESGSSEGGPGESPGGSSGSESGSGGEPSESGSSGSSESGSSEGGPGESPGGSSGSESGSGGEPSESGSSGESPGGSSGSESGSGGEPSESGSSGVPIQKVQDDTKTLIKTIVTRINDISHTQSVSSKQKVTGLDFIPGLHPILTLSKMDQTLAVYQQILTSMPSRNVIQISNDLENLRDLLHVLAFSKSCHLPWASGLETLDSLGGVLEASGYSTEVVALSRLQGSLQDMLWQLDLSPGC

SEQ ID NO: 1367 - protein, 1011 aa, Artificial Sequence
  Description of Artificial Sequence: Synthetic polypeptide
GSPAGSPTSTEEGTSESATPESGPGTSTEPSEGSAPGSPAGSPTSTEEGTSTEPSEGSAPGTSTEPSEGSAPGTSESATPESGPGSEPATSGSETPGSEPATSGSETPGSPAGSPTSTEEGTSESATPESGPGTSTEPSEGSAPGTSTEPSEGSAPGSPAGSPTSTEEGTSTEPSEGSAPGTSTEPSEGSAPGTSESATPESGPGTSTEPSEGSAPGTSESATPESGPGSEPATSGSETPGTSTEPSEGSAPGTSTEPSEGSAPGTSESATPESGPGTSESATPESGPGSPAGSPTSTEEGTSESATPESGPGSEPATSGSETPGTSESATPESGPGTSTEPSEGSAPGTSTEPSEGSAPGTSTEPSEGSAPGTSTEPSEGSAPGTSTEPSEGSAPGTSTEPSEGSAPGSPAGSPTSTEEGTSTEPSEGSAPGTSESATPESGPGSEPATSGSETPGTSESATPESGPGSEPATSGSETPGTSESATPESGPGTSTEPSEGSAPGTSESATPESGPGSPAGSPTSTEEGSPAGSPTSTEEGSPAGSPTSTEEGTSESATPESGPGTSTEPSEGSAPGTSESATPESGPGSEPATSGSETPGTSESATPESGPGSEPATSGSETPGTSESATPESGPGTSTEPSEGSAPGSPAGSPTSTEEGTSESATPESGPGSEPATSGSETPGTSESATPESGPGSPAGSPTSTEEGSPAGSPTSTEEGTSTEPSEGSAPGTSESATPESGPGTSESATPESGPGTSESATPESGPGSEPATSGSETPGSEPATSGSETPGSPAGSPTSTEEGTSTEPSEGSAPGTSTEPSEGSAPGSEPATSGSETPGTSESATPESGPGTSTEPSEGSAPGVPIQKVQDDTKTLIKTIVTRINDISHTQSVSSKQKVTGLDFIPGLHPILTLSKMDQTLAVYQQILTSMPSRNVIQISNDLENLRDLLHVLAFSKSCHLPWASGLETLDSLGGVLEASGYSTEVVALSRLQGSLQDMLWQLDLSPGC

SEQ ID NO: 1368 - protein, 1022 aa, Artificial Sequence
  Description of Artificial Sequence: Synthetic polypeptide
  MOD_RES (430)..(432): Any amino acid
  MOD_RES (443)..(446): Any amino acid
GSTSESPSGTAPGTSPSGESSTAPGSTSESPSGTAPGSTSESPSGTAPGTSTPESGSASPGTSTPESGSASPGSTSESPSGTAPGSTSESPSGTAPGTSPSGESSTAPGSTSESPSGTAPGTSPSGESSTAPGTSPSGESSTAPGSTSSTAESPGPGTSPSGESSTAPGTSPSGESSTAPGSTSSTAESPGPGTSTPESGSASPGTSTPESGSASPGSTSESPSGTAPGSTSESPSGTAPGTSTPESGSASPGSTSSTAESPGPGTSTPESGSASPGSTSESPSGTAPGTSPSGESSTAPGSTSSTAESPGPGTSPSGESSTAPGTSTPESGSASPGSTSSTAESPGPGSTSSTAESPGPGSTSSTAESPGPGSTSSTAESPGPGTSPSGESSTAPGSTSESPSGTAPGSTSESPSGTAPGTSTPESGPXXXGASASGAPSTXXXXSESPSGTAPGSTSESPSGTAPGSTSESPSGTAPGSTSESPSGTAPGSTSESPSGTAPGSTSESPSGTAPGTSTPESGSASPGTSPSGESSTAPGTSPSGESSTAPGSTSSTAESPGPGTSPSGESSTAPGTSTPESGSASPGSTSESPSGTAPGSTSESPSGTAPGTSPSGESSTAPGSTSESPSGTAPGTSTPESGSASPGTSTPESGSASPGSTSESPSGTAPGTSTPESGSASPGSTSSTAESPGPGSTSESPSGTAPGSTSESPSGTAPGTSPSGESSTAPGSTSSTAESPGPGTSPSGESSTAPGTSTPESGSASPGTSPSGESSTAPGTSPSGESSTAPGTSPSGESSTAPGSTSSTAESPGPGSTSSTAESPGPGTSPSGESSTAPGSSPSASTGTGPGSSTPSGATGSPGSSTPSGATGSPGVPIQKVQDDTKTLIKTIVTRINDISHTQSVSSKQKVTGLDFIPGLHPILTLSKMDQTLAVYQQILTSMPSRNVIQISNDLENLRDLLHVLAFSKSCHLPWASGLETLDSLGGVLEASGYSTEVVALSRLQGSLQDMLWQLDLSPGC

SEQ ID NO: 1369 - protein, 1011 aa, Artificial Sequence
  Description of Artificial Sequence: Synthetic polypeptide
GASPGTSSTGSPGSSPSASTGTGPGSSPSASTGTGPGTPGSGTASSSPGSSTPSGATGSPGSNPSASTGTGPGASPGTSSTGSPGTPGSGTASSSPGSSTPSGATGSPGTPGSGTASSSPGASPGTSSTGSPGASPGTSSTGSPGTPGSGTASSSPGSSTPSGATGSPGASPGTSSTGSPGTPGSGTASSSPGSSTPSGATGSPGSNPSASTGTGPGSSPSASTGTGPGSSTPSGATGSPGSSTPSGATGSPGASPGTSSTGSPGASPGTSSTGSPGASPGTSSTGSPGTPGSGTASSSPGASPGTSSTGSPGASPGTSSTGSPGASPGTSSTGSPGSSPSASTGTGPGTPGSGTASSSPGASPGTSSTGSPGASPGTSSTGSPGASPGTSSTGSPGSSTPSGATGSPGSSTPSGATGSPGASPGTSSTGSPGTPGSGTASSSPGSSTPSGATGSPGSSTPSGATGSPGSSTPSGATGSPGSSPSASTGTGPGASPGTSSTGSPGASPGTSSTGSPGTPGSGTASSSPGASPGTSSTGSPGASPGTSSTGSPGASPGTSSTGSPGASPGTSSTGSPGTPGSGTASSSPGSSTPSGATGSPGTPGSGTASSSPGSSTPSGATGSPGTPGSGTASSSPGSSTPSGATGSPGSSTPSGATGSPGSSPSASTGTGPGSSPSASTGTGPGASPGTSSTGSPGTPGSGTASSSPGSSTPSGATGSPGSSPSASTGTGPGSSPSASTGTGPGASPGTSSTGSPGASPGTSSTGSPGSSTPSGATGSPGSSPSASTGTGPGASPGTSSTGSPGSSPSASTGTGPGTPGSGTASSSPGSSTPSGATGSPGSSTPSGATGSPGASPGTSSTGSPGVPIQKVQDDTKTLIKTIVTRINDISHTQSVSSKQKVTGLDFIPGLHPILTLSKMDQTLAVYQQILTSMPSRNVIQISNDLENLRDLLHVLAFSKSCHLPWASGLETLDSLGGVLEASGYSTEVVALSRLQGSLQDMLWQLDLSPGC

SEQ ID NO: 1370 - protein, 1022 aa, Artificial Sequence
  Description of Artificial Sequence: Synthetic polypeptide
GTSTEPSEGSAPGSEPATSGSETPGSPAGSPTSTEEGSTSSTAESPGPGTSTPESGSASPGSTSESPSGTAPGSTSESPSGTAPGTSTPESGSASPGTSTPESGSASPGSEPATSGSETPGTSESATPESGPGSPAGSPTSTEEGTSTEPSEGSAPGTSESATPESGPGTSTEPSEGSAPGTSTEPSEGSAPGSPAGSPTSTEEGTSTEPSEGSAPGTSTEPSEGSAPGTSESATPESGPGTSESATPESGPGTSTEPSEGSAPGTSTEPSEGSAPGTSESATPESGPGTSTEPSEGSAPGSEPATSGSETPGSPAGSPTSTEEGSSTPSGATGSPGTPGSGTASSSPGSSTPSGATGSPGTSTEPSEGSAPGTSTEPSEGSAPGSEPATSGSETPGSPAGSPTSTEEGSPAGSPTSTEEGTSTEPSEGSAPGASASGAPSTGGTSESATPESGPGSPAGSPTSTEEGSPAGSPTSTEEGSTSSTAESPGPGSTSESPSGTAPGTSPSGESSTAPGTPGSGTASSSPGSSTPSGATGSPGSSPSASTGTGPGSEPATSGSETPGTSESATPESGPGSEPATSGSETPGSTSSTAESPGPGSTSSTAESPGPGTSPSGESSTAPGSEPATSGSETPGSEPATSGSETPGTSTEPSEGSAPGSTSSTAESPGPGTSTPESGSASPGSTSESPSGTAPGTSTEPSEGSAPGTSTEPSEGSAPGTSTEPSEGSAPGSSTPSGATGSPGSSPSASTGTGPGASPGTSSTGSPGSEPATSGSETPGTSESATPESGPGSPAGSPTSTEEGSSTPSGATGSPGSSPSASTGTGPGASPGTSSTGSPGTSESATPESGPGTSTEPSEGSAPGTSTEPSEGSAPGVPIQKVQDDTKTLIKTIVTRINDISHTQSVSSKQKVTGLDFIPGLHPILTLSKMDQTLAVYQQILTSMPSRNVIQISNDLENLRDLLHVLAFSKSCHLPWASGLETLDSLGGVLEASGYSTEVVALSRLQGSLQDMLWQLDLSPGC

SEQ ID NO: 1371 - protein, 1465 aa, Artificial Sequence
  Description of Artificial Sequence: Synthetic polypeptide
GTSTEPSEGSAPGSEPATSGSETPGSPAGSPTSTEEGSTSSTAESPGPGTSTPESGSASPGSTSESPSGTAPGSTSESPSGTAPGTSTPESGSASPGTSTPESGSASPGSEPATSGSETPGTSESATPESGPGSPAGSPTSTEEGTSTEPSEGSAPGTSESATPESGPGTSTEPSEGSAPGTSTEPSEGSAPGSPAGSPTSTEEGTSTEPSEGSAPGTSTEPSEGSAPGTSESATPESGPGTSESATPESGPGTSTEPSEGSAPGTSTEPSEGSAPGTSESATPESGPGTSTEPSEGSAPGSEPATSGSETPGSPAGSPTSTEEGSSTPSGATGSPGTPGSGTASSSPGSSTPSGATGSPGTSTEPSEGSAPGTSTEPSEGSAPGSEPATSGSETPGSPAGSPTSTEEGSPAGSPTSTEEGTSTEPSEGSAPGPEPTGPAPSGGSEPATSGSETPGTSESATPESGPGSPAGSPTSTEEGTSESATPESGPGSPAGSPTSTEEGSPAGSPTSTEEGTSESATPESGPGSPAGSPTSTEEGSPAGSPTSTEEGSTSSTAESPGPGSTSESPSGTAPGTSPSGESSTAPGSTSESPSGTAPGSTSESPSGTAPGTSPSGESSTAPGTSTEPSEGSAPGTSESATPESGPGTSESATPESGPGSEPATSGSETPGTSESATPESGPGTSESATPESGPGTSTEPSEGSAPGTSESATPESGPGTSTEPSEGSAPGTSPSGESSTAPGTSPSGESSTAPGTSPSGESSTAPGTSTEPSEGSAPGSPAGSPTSTEEGTSTEPSEGSAPGSSPSASTGTGPGSSTPSGATGSPGSSTPSGATGSPGSSTPSGATGSPGSSTPSGATGSPGASPGTSSTGSPGASASGAPSTGGTSPSGESSTAPGSTSSTAESPGPGTSPSGESSTAPGTSESATPESGPGTSTEPSEGSAPGTSTEPSEGSAPGSSPSASTGTGPGSSTPSGATGSPGASPGTSSTGSPGTSTPESGSASPGTSPSGESSTAPGTSPSGESSTAPGTSESATPESGPGSEPATSGSETPGTSTEPSEGSAPGSTSESPSGTAPGSTSESPSGTAPGTSTPESGSASPGSPAGSPTSTEEGTSESATPESGPGTSTEPSEGSAPGSPAGSPTSTEEGTSESATPESGPGSEPATSGSETPGSSTPSGATGSPGASPGTSSTGSPGSSTPSGATGSPGSTSESPSGTAPGTSPSGESSTAPGSTSSTAESPGPGSSTPSGATGSPGASPGTSSTGSPGTPGSGTASSSPGSPAGSPTSTEEGSPAGSPTSTEEGTSTEPSEGSAPGVPIQKVQDDTKTLIKTIVTRINDISHTQSVSSKQKVTGLDFIPGLHPILTLSKMDQTLAVYQQILTSMPSRNVIQISNDLENLRDLLHVLAFSKSCHLPWASGLETLDSLGGVLEASGYSTEVVALSRLQGSLQDMLWQLDLSPGC

SEQ ID NO: 1372 - protein, 170 aa, Artificial Sequence
  Description of Artificial Sequence: Synthetic polypeptide
FRVDEEFQSPFASQSRGYFLFRPRNGGSEPATSGSETPGTSESATPESGPGSEPATSGSETPGSPAGSPTSTEEGTSTEPSEGSAPGSEPATSGSETPGSEPATSGSETPGSEPATSGSETPGTSTEPSEGSAPGTSESATPESGPGSEPATSGSETPGTSTEPSEGSAP

SEQ ID NO: 1373 - protein, 170 aa, Artificial Sequence
  Description of Artificial Sequence: Synthetic polypeptide
FRVDEEFQSPFASQSRGYFLFRPRNGGTSTPESGSASPGTSPSGESSTAPGTSPSGESSTAPGSTSSTAESPGPGSTSESPSGTAPGSTSSTAESPGPGTSPSGESSTAPGTSTPESGSASPGSTSSTAESPGPGTSPSGESSTAPGTSPSGESSTAPGTSPSGESSTAP

SEQ ID NO: 1374 - protein, 314 aa, Artificial Sequence
  Description of Artificial Sequence: Synthetic polypeptide
FRVDEEFQSPFASQSRGYFLFRPRNGGTSESATPESGPGSEPATSGSETPGTSESATPESGPGSEPATSGSETPGTSESATPESGPGTSTEPSEGSAPGSPAGSPTSTEEGTSESATPESGPGSEPATSGSETPGTSESATPESGPGSPAGSPTSTEEGSPAGSPTSTEEGTSTEPSEGSAPGTSESATPESGPGTSESATPESGPGTSESATPESGPGSEPATSGSETPGSEPATSGSETPGSPAGSPTSTEEGTSTEPSEGSAPGTSTEPSEGSAPGSEPATSGSETPGTSESATPESGPGTSTEPSEGSAP

SEQ ID NO: 1375 - protein, 602 aa, Artificial Sequence
  Description of Artificial Sequence: Synthetic polypeptide
FRVDEEFQSPFASQSRGYFLFRPRNGGSPAGSPTSTEEGTSESATPESGPGTSTEPSEGSAPGSPAGSPTSTEEGTSTEPSEGSAPGTSTEPSEGSAPGTSESATPESGPGSEPATSGSETPGSEPATSGSETPGSPAGSPTSTEEGTSESATPESGPGTSTEPSEGSAPGTSTEPSEGSAPGSPAGSPTSTEEGTSTEPSEGSAPGTSTEPSEGSAPGTSESATPESGPGTSTEPSEGSAPGTSESATPESGPGSEPATSGSETPGTSTEPSEGSAPGTSTEPSEGSAPGTSESATPESGPGTSESATPESGPGSPAGSPTSTEEGTSESATPESGPGSEPATSGSETPGTSESATPESGPGTSTEPSEGSAPGTSTEPSEGSAPGTSTEPSEGSAPGTSTEPSEGSAPGTSTEPSEGSAPGTSTEPSEGSAPGSPAGSPTSTEEGTSTEPSEGSAPGTSESATPESGPGSEPATSGSETPGTSESATPESGPGSEPATSGSETPGTSESATPESGPGTSTEPSEGSAPGTSESATPESGPGSPAGSPTSTEEGSPAGSPTSTEEGSPAGSPTSTEEGTSESATPESGPGTSTEPSEGSAP

SEQ ID NO: 1376 - protein, 602 aa, Artificial Sequence
  Description of Artificial Sequence: Synthetic polypeptide
FRVDEEFQSPFASQSRGYFLFRPRNGGSTSSTAESPGPGSTSSTAESPGPGSTSESPSGTAPGSTSSTAESPGPGSTSSTAESPGPGTSTPESGSASPGSTSESPSGTAPGTSPSGESSTAPGSTSESPSGTAPGSTSESPSGTAPGTSPSGESSTAPGSTSESPSGTAPGSTSESPSGTAPGTSPSGESSTAPGSTSESPSGTAPGSTSESPSGTAPGSTSESPSGTAPGTSTPESGSASPGSTSESPSGTAPGTSTPESGSASPGSTSSTAESPGPGSTSSTAESPGPGTSTPESGSASPGTSTPESGSASPGSTSESPSGTAPGTSTPESGSASPGTSTPESGSASPGSTSESPSGTAPGSTSESPSGTAPGSTSESPSGTAPGSTSSTAESPGPGTSTPESGSASPGTSTPESGSASPGSTSESPSGTAPGSTSESPSGTAPGTSTPESGSASPGSTSESPSGTAPGSTSESPSGTAPGTSTPESGSASPGTSPSGESSTAPGSTSSTAESPGPGTSPSGESSTAPGSTSSTAESPGPGTSTPESGSASPGSTSESPSGTAPGSTSSTAESPGPGTSTPESGSASPGTSTPESGSASP

SEQ ID NO: 1377 - protein, 862 aa, Artificial Sequence
  Description of Artificial Sequence: Synthetic polypeptide
FRVDEEFQSPFASQSRGYFLFRPRNGGSSESGSSEGGPGSSESGSSEGGPGESPGGSSGSESGSGGEPSESGSSGESPGGSSGSESGESPGGSSGSESGSSESGSSEGGPGSSESGSSEGGPGSSESGSSEGGPGESPGGSSGSESGESPGGSSGSESGESPGGSSGSESGSSESGSSEGGPGSSESGSSEGGPGSSESGSSEGGPGSSESGSSEGGPGSSESGSSEGGPGSSESGSSEGGPGSGGEPSESGSSGESPGGSSGSESGESPGGSSGSESGSGGEPSESGSSGSEGSSGPGESSGSSESGSSEGGPGSGGEPSESGSSGSEGSSGPGESSGSSESGSSEGGPGSGGEPSESGSSGESPGGSSGSESGSGGEPSESGSSGSGGEPSESGSSGSSESGSSEGGPGSGGEPSESGSSGSGGEPSESGSSGSEGSSGPGESSGESPGGSSGSESGSEGSSGPGESSGSEGSSGPGESSGSGGEPSESGSSGSSESGSSEGGPGSSESGSSEGGPGESPGGSSGSESGSGGEPSESGSSGSEGSSGPGESSGESPGGSSGSESGSEGSSGPGSSESGSSEGGPGSGGEPSESGSSGSEGSSGPGESSGSEGSSGPGESSGSEGSSGPGESSGSGGEPSESGSSGSGGEPSESGSSGESPGGSSGSESGESPGGSSGSESGSGGEPSESGSSGSEGSSGPGESSGESPGGSSGSESGSSESGSSEGGPGSSESGSSEGGPGSSESGSSEGGPGSGGEPSESGSSGSSESGSSEGGPGESPGGSSGSESGSGGEPSESGSSGSSESGSSEGGPGESPGGSSGSESGSGGEPSESGSSGESPGGSSGSESGSGGEPSESGSS

SEQ ID NO: 1378 - protein, 890 aa, Artificial Sequence
  Description of Artificial Sequence: Synthetic polypeptide
FRVDEEFQSPFASQSRGYFLFRPRNGGSPAGSPTSTEEGTSESATPESGPGTSTEPSEGSAPGSPAGSPTSTEEGTSTEPSEGSAPGTSTEPSEGSAPGTSESATPESGPGSEPATSGSETPGSEPATSGSETPGSPAGSPTSTEEGTSESATPESGPGTSTEPSEGSAPGTSTEPSEGSAPGSPAGSPTSTEEGTSTEPSEGSAPGTSTEPSEGSAPGTSESATPESGPGTSTEPSEGSAPGTSESATPESGPGSEPATSGSETPGTSTEPSEGSAPGTSTEPSEGSAPGTSESATPESGPGTSESATPESGPGSPAGSPTSTEEGTSESATPESGPGSEPATSGSETPGTSESATPESGPGTSTEPSEGSAPGTSTEPSEGSAPGTSTEPSEGSAPGTSTEPSEGSAPGTSTEPSEGSAPGTSTEPSEGSAPGSPAGSPTSTEEGTSTEPSEGSAPGTSESATPESGPGSEPATSGSETPGTSESATPESGPGSEPATSGSETPGTSESATPESGPGTSTEPSEGSAPGTSESATPESGPGSPAGSPTSTEEGSPAGSPTSTEEGSPAGSPTSTEEGTSESATPESGPGTSTEPSEGSAPGTSESATPESGPGSEPATSGSETPGTSESATPESGPGSEPATSGSETPGTSESATPESGPGTSTEPSEGSAPGSPAGSPTSTEEGTSESATPESGPGSEPATSGSETPGTSESATPESGPGSPAGSPTSTEEGSPAGSPTSTEEGTSTEPSEGSAPGTSESATPESGPGTSESATPESGPGTSESATPESGPGSEPATSGSETPGSEPATSGSETPGSPAGSPTSTEEGTSTEPSEGSAPGTSTEPSEGSAPGSEPATSGSETPGTSESATPESGPGTSTEPSEGSAP

SEQ ID NO: 1379 - protein, 901 aa, Artificial Sequence
  Description of Artificial Sequence: Synthetic polypeptide
  MOD_RES (456)..(458): Any amino acid
  MOD_RES (469)..(472): Any amino acid
FRVDEEFQSPFASQSRGYFLFRPRNGGSTSESPSGTAPGTSPSGESSTAPGSTSESPSGTAPGSTSESPSGTAPGTSTPESGSASPGTSTPESGSASPGSTSESPSGTAPGSTSESPSGTAPGTSPSGESSTAPGSTSESPSGTAPGTSPSGESSTAPGTSPSGESSTAPGSTSSTAESPGPGTSPSGESSTAPGTSPSGESSTAPGSTSSTAESPGPGTSTPESGSASPGTSTPESGSASPGSTSESPSGTAPGSTSESPSGTAPGTSTPESGSASPGSTSSTAESPGPGTSTPESGSASPGSTSESPSGTAPGTSPSGESSTAPGSTSSTAESPGPGTSPSGESSTAPGTSTPESGSASPGSTSSTAESPGPGSTSSTAESPGPGSTSSTAESPGPGSTSSTAESPGPGTSPSGESSTAPGSTSESPSGTAPGSTSESPSGTAPGTSTPESGPXXXGASASGAPSTXXXXSESPSGTAPGSTSESPSGTAPGSTSESPSGTAPGSTSESPSGTAPGSTSESPSGTAPGSTSESPSGTAPGTSTPESGSASPGTSPSGESSTAPGTSPSGESSTAPGSTSSTAESPGPGTSPSGESSTAPGTSTPESGSASPGSTSESPSGTAPGSTSESPSGTAPGTSPSGESSTAPGSTSESPSGTAPGTSTPESGSASPGTSTPESGSASPGSTSESPSGTAPGTSTPESGSASPGSTSSTAESPGPGSTSESPSGTAPGSTSESPSGTAPGTSPSGESSTAPGSTSSTAESPGPGTSPSGESSTAPGTSTPESGSASPGTSPSGESSTAPGTSPSGESSTAPGTSPSGESSTAPGSTSSTAESPGPGSTSSTAESPGPGTSPSGESSTAPGSSPSASTGTGPGSSTPSGATGSPGSSTPSGATGSP

SEQ ID NO: 1380 - protein, 890 aa, Artificial Sequence
  Description of Artificial Sequence: Synthetic polypeptide
FRVDEEFQSPFASQSRGYFLFRPRNGGASPGTSSTGSPGSSPSASTGTGPGSSPSASTGTGPGTPGSGTASSSPGSSTPSGATGSPGSNPSASTGTGPGASPGTSSTGSPGTPGSGTASSSPGSSTPSGATGSPGTPGSGTASSSPGASPGTSSTGSPGASPGTSSTGSPGTPGSGTASSSPGSSTPSGATGSPGASPGTSSTGSPGTPGSGTASSSPGSSTPSGATGSPGSNPSASTGTGPGSSPSASTGTGPGSSTPSGATGSPGSSTPSGATGSPGASPGTSSTGSPGASPGTSSTGSPGASPGTSSTGSPGTPGSGTASSSPGASPGTSSTGSPGASPGTSSTGSPGASPGTSSTGSPGSSPSASTGTGPGTPGSGTASSSPGASPGTSSTGSPGASPGTSSTGSPGASPGTSSTGSPGSSTPSGATGSPGSSTPSGATGSPGASPGTSSTGSPGTPGSGTASSSPGSSTPSGATGSPGSSTPSGATGSPGSSTPSGATGSPGSSPSASTGTGPGASPGTSSTGSPGASPGTSSTGSPGTPGSGTASSSPGASPGTSSTGSPGASPGTSSTGSPGASPGTSSTGSPGASPGTSSTGSPGTPGSGTASSSPGSSTPSGATGSPGTPGSGTASSSPGSSTPSGATGSPGTPGSGTASSSPGSSTPSGATGSPGSSTPSGATGSPGSSPSASTGTGPGSSPSASTGTGPGASPGTSSTGSPGTPGSGTASSSPGSSTPSGATGSPGSSPSASTGTGPGSSPSASTGTGPGASPGTSSTGSPGASPGTSSTGSPGSSTPSGATGSPGSSPSASTGTGPGASPGTSSTGSPGSSPSASTGTGPGTPGSGTASSSPGSSTPSGATGSPGSSTPSGATGSPGASPGTSSTGSP

SEQ ID NO: 1381 - protein, 901 aa, Artificial Sequence
  Description of Artificial Sequence: Synthetic polypeptide
FRVDEEFQSPFASQSRGYFLFRPRNGGTSTEPSEGSAPGSEPATSGSETPGSPAGSPTSTEEGSTSSTAESPGPGTSTPESGSASPGSTSESPSGTAPGSTSESPSGTAPGTSTPESGSASPGTSTPESGSASPGSEPATSGSETPGTSESATPESGPGSPAGSPTSTEEGTSTEPSEGSAPGTSESATPESGPGTSTEPSEGSAPGTSTEPSEGSAPGSPAGSPTSTEEGTSTEPSEGSAPGTSTEPSEGSAPGTSESATPESGPGTSESATPESGPGTSTEPSEGSAPGTSTEPSEGSAPGTSESATPESGPGTSTEPSEGSAPGSEPATSGSETPGSPAGSPTSTEEGSSTPSGATGSPGTPGSGTASSSPGSSTPSGATGSPGTSTEPSEGSAPGTSTEPSEGSAPGSEPATSGSETPGSPAGSPTSTEEGSPAGSPTSTEEGTSTEPSEGSAPGASASGAPSTGGTSESATPESGPGSPAGSPTSTEEGSPAGSPTSTEEGSTSSTAESPGPGSTSESPSGTAPGTSPSGESSTAPGTPGSGTASSSPGSSTPSGATGSPGSSPSASTGTGPGSEPATSGSETPGTSESATPESGPGSEPATSGSETPGSTSSTAESPGPGSTSSTAESPGPGTSPSGESSTAPGSEPATSGSETPGSEPATSGSETPGTSTEPSEGSAPGSTSSTAESPGPGTSTPESGSASPGSTSESPSGTAPGTSTEPSEGSAPGTSTEPSEGSAPGTSTEPSEGSAPGSSTPSGATGSPGSSPSASTGTGPGASPGTSSTGSPGSEPATSGSETPGTSESATPESGPGSPAGSPTSTEEGSSTPSGATGSPGSSPSASTGTGPGASPGTSSTGSPGTSESATPESGPGTSTEPSEGSAPGTSTEPSEGSAP

SEQ ID NO: 1382 - protein, 1344 aa, Artificial Sequence
  Description of Artificial Sequence: Synthetic polypeptide
FRVDEEFQSPFASQSRGYFLFRPRNGGTSTEPSEGSAPGSEPATSGSETPGSPAGSPTSTEEGSTSSTAESPGPGTSTPESGSASPGSTSESPSGTAPGSTSESPSGTAPGTSTPESGSASPGTSTPESGSASPGSEPATSGSETPGTSESATPESGPGSPAGSPTSTEEGTSTEPSEGSAPGTSESATPESGPGTSTEPSEGSAPGTSTEPSEGSAPGSPAGSPTSTEEGTSTEPSEGSAPGTSTEPSEGSAPGTSESATPESGPGTSESATPESGPGTSTEPSEGSAPGTSTEPSEGSAPGTSESATPESGPGTSTEPSEGSAPGSEPATSGSETPGSPAGSPTSTEEGSSTPSGATGSPGTPGSGTASSSPGSSTPSGATGSPGTSTEPSEGSAPGTSTEPSEGSAPGSEPATSGSETPGSPAGSPTSTEEGSPAGSPTSTEEGTSTEPSEGSAPGPEPTGPAPSGGSEPATSGSETPGTSESATPESGPGSPAGSPTSTEEGTSESATPESGPGSPAGSPTSTEEGSPAGSPTSTEEGTSESATPESGPGSPAGSPTSTEEGSPAGSPTSTEEGSTSSTAESPGPGSTSESPSGTAPGTSPSGESSTAPGSTSESPSGTAPGSTSESPSGTAPGTSPSGESSTAPGTSTEPSEGSAPGTSESATPESGPGTSESATPESGPGSEPATSGSETPGTSESATPESGPGTSESATPESGPGTSTEPSEGSAPGTSESATPESGPGTSTEPSEGSAPGTSPSGESSTAPGTSPSGESSTAPGTSPSGESSTAPGTSTEPSEGSAPGSPAGSPTSTEEGTSTEPSEGSAPGSSPSASTGTGPGSSTPSGATGSPGSSTPSGATGSPGSSTPSGATGSPGSSTPSGATGSPGASPGTSSTGSPGASASGAPSTGGTSPSGESSTAPGSTSSTAESPGPGTSPSGESSTAPGTSESATPESGPGTSTEPSEGSAPGTSTEPSEGSAPGSSPSASTGTGPGSSTPSGATGSPGASPGTSSTGSPGTSTPESGSASPGTSPSGESSTAPGTSPSGESSTAPGTSESATPESGPGSEPATSGSETPGTSTEPSEGSAPGSTSESPSGTAPGSTSESPSGTAPGTSTPESGSASPGSPAGSPTSTEEGTSESATPESGPGTSTEPSEGSAPGSPAGSPTSTEEGTSESATPESGPGSEPATSGSETPGSSTPSGATGSPGASPGTSSTGSPGSSTPSGATGSPGSTSESPSGTAPGTSPSGESSTAPGSTSSTAESPGPGSSTPSGATGSPGASPGTSSTGSPGTPGSGTASSSPGSPAGSPTSTEEGSPAGSPTSTEEGTSTEPSEGSAP

SEQ ID NO: 1383 - protein, 939 aa, Artificial Sequence
  Description of Artificial Sequence: Synthetic polypeptide
MAEPAGSPTSTEEGTPGSGTASSSPGSSTPSGATGSPGASPGTSSTGSPGSPAGSPTSTEEGTSESATPESGPGTSTEPSEGSAPGSPAGSPTSTEEGTSTEPSEGSAPGTSTEPSEGSAPGTSESATPESGPGSEPATSGSETPGSEPATSGSETPGSPAGSPTSTEEGTSESATPESGPGTSTEPSEGSAPGTSTEPSEGSAPGSPAGSPTSTEEGTSTEPSEGSAPGTSTEPSEGSAPGTSESATPESGPGTSTEPSEGSAPGTSESATPESGPGSEPATSGSETPGTSTEPSEGSAPGTSTEPSEGSAPGTSESATPESGPGTSESATPESGPGSPAGSPTSTEEGTSESATPESGPGSEPATSGSETPGTSESATPESGPGTSTEPSEGSAPGTSTEPSEGSAPGTSTEPSEGSAPGTSTEPSEGSAPGTSTEPSEGSAPGTSTEPSEGSAPGSPAGSPTSTEEGTSTEPSEGSAPGTSESATPESGPGSEPATSGSETPGTSESATPESGPGSEPATSGSETPGTSESATPESGPGTSTEPSEGSAPGTSESATPESGPGSPAGSPTSTEEGSPAGSPTSTEEGSPAGSPTSTEEGTSESATPESGPGTSTEPSEGSAPGTSESATPESGPGSEPATSGSETPGTSESATPESGPGSEPATSGSETPGTSESATPESGPGTSTEPSEGSAPGSPAGSPTSTEEGTSESATPESGPGSEPATSGSETPGTSESATPESGPGSPAGSPTSTEEGSPAGSPTSTEEGTSTEPSEGSAPGTSESATPESGPGTSESATPESGPGTSESATPESGPGSEPATSGSETPGSEPATSGSETPGSPAGSPTSTEEGTSTEPSEGSAPGTSTEPSEGSAPGSEPATSGSETPGTSESATPESGPGTSTEPSEGSAPGFRVDEEFQSPFASQSRGYFLFRPRN

SEQ ID NO: 1384 - protein, 950 aa, Artificial Sequence
  Description of Artificial Sequence: Synthetic polypeptide
MAEPAGSPTSTEEGASPGTSSTGSPGSSTPSGATGSPGSSTPSGATGSPGTSTEPSEGSAPGSEPATSGSETPGSPAGSPTSTEEGSTSSTAESPGPGTSTPESGSASPGSTSESPSGTAPGSTSESPSGTAPGTSTPESGSASPGTSTPESGSASPGSEPATSGSETPGTSESATPESGPGSPAGSPTSTEEGTSTEPSEGSAPGTSESATPESGPGTSTEPSEGSAPGTSTEPSEGSAPGSPAGSPTSTEEGTSTEPSEGSAPGTSTEPSEGSAPGTSESATPESGPGTSESATPESGPGTSTEPSEGSAPGTSTEPSEGSAPGTSESATPESGPGTSTEPSEGSAPGSEPATSGSETPGSPAGSPTSTEEGSSTPSGATGSPGTPGSGTASSSPGSSTPSGATGSPGTSTEPSEGSAPGTSTEPSEGSAPGSEPATSGSETPGSPAGSPTSTEEGSPAGSPTSTEEGTSTEPSEGSAPGASASGAPSTGGTSESATPESGPGSPAGSPTSTEEGSPAGSPTSTEEGSTSSTAESPGPGSTSESPSGTAPGTSPSGESSTAPGTPGSGTASSSPGSSTPSGATGSPGSSPSASTGTGPGSEPATSGSETPGTSESATPESGPGSEPATSGSETPGSTSSTAESPGPGSTSSTAESPGPGTSPSGESSTAPGSEPATSGSETPGSEPATSGSETPGTSTEPSEGSAPGSTSSTAESPGPGTSTPESGSASPGSTSESPSGTAPGTSTEPSEGSAPGTSTEPSEGSAPGTSTEPSEGSAPGSSTPSGATGSPGSSPSASTGTGPGASPGTSSTGSPGSEPATSGSETPGTSESATPESGPGSPAGSPTSTEEGSSTPSGATGSPGSSPSASTGTGPGASPGTSSTGSPGTSESATPESGPGTSTEPSEGSAPGTSTEPSEGSAPGFRVDEEFQSPFASQSRGYFLFRPRN

SEQ ID NO: 1385 - protein, 170 aa, Artificial Sequence
  Description of Artificial Sequence: Synthetic polypeptide
GSEPATSGSETPGTSESATPESGPGSEPATSGSETPGSPAGSPTSTEEGTSTEPSEGSAPGSEPATSGSETPGSEPATSGSETPGSEPATSGSETPGTSTEPSEGSAPGTSESATPESGPGSEPATSGSETPGTSTEPSEGSAPGFRVDEEFQSPFASQSRGYFLFRPRN

SEQ ID NO: 1386 - protein, 170 aa, Artificial Sequence
  Description of Artificial Sequence: Synthetic polypeptide
GTSTPESGSASPGTSPSGESSTAPGTSPSGESSTAPGSTSSTAESPGPGSTSESPSGTAPGSTSSTAESPGPGTSPSGESSTAPGTSTPESGSASPGSTSSTAESPGPGTSPSGESSTAPGTSPSGESSTAPGTSPSGESSTAPGFRVDEEFQSPFASQSRGYFLFRPRN

SEQ ID NO: 1387 - protein, 314 aa, Artificial Sequence
  Description of Artificial Sequence: Synthetic polypeptide
GTSESATPESGPGSEPATSGSETPGTSESATPESGPGSEPATSGSETPGTSESATPESGPGTSTEPSEGSAPGSPAGSPTSTEEGTSESATPESGPGSEPATSGSETPGTSESATPESGPGSPAGSPTSTEEGSPAGSPTSTEEGTSTEPSEGSAPGTSESATPESGPGTSESATPESGPGTSESATPESGPGSEPATSGSETPGSEPATSGSETPGSPAGSPTSTEEGTSTEPSEGSAPGTSTEPSEGSAPGSEPATSGSETPGTSESATPESGPGTSTEPSEGSAPGFRVDEEFQSPFASQSRGYFLFRPRN

SEQ ID NO: 1388 - protein, 602 aa, Artificial Sequence
  Description of Artificial Sequence: Synthetic polypeptide
GSPAGSPTSTEEGTSESATPESGPGTSTEPSEGSAPGSPAGSPTSTEEGTSTEPSEGSAPGTSTEPSEGSAPGTSESATPESGPGSEPATSGSETPGSEPATSGSETPGSPAGSPTSTEEGTSESATPESGPGTSTEPSEGSAPGTSTEPSEGSAPGSPAGSPTSTEEGTSTEPSEGSAPGTSTEPSEGSAPGTSESATPESGPGTSTEPSEGSAPGTSESATPESGPGSEPATSGSETPGTSTEPSEGSAPGTSTEPSEGSAPGTSESATPESGPGTSESATPESGPGSPAGSPTSTEEGTSESATPESGPGSEPATSGSETPGTSESATPESGPGTSTEPSEGSAPGTSTEPSEGSAPGTSTEPSEGSAPGTSTEPSEGSAPGTSTEPSEGSAPGTSTEPSEGSAPGSPAGSPTSTEEGTSTEPSEGSAPGTSESATPESGPGSEPATSGSETPGTSESATPESGPGSEPATSGSETPGTSESATPESGPGTSTEPSEGSAPGTSESATPESGPGSPAGSPTSTEEGSPAGSPTSTEEGSPAGSPTSTEEGTSESATPESGPGTSTEPSEGSAPGFRVDEEFQSPFASQSRGYFLFRPRN

SEQ ID NO: 1389 - protein, 602 aa, Artificial Sequence
  Description of Artificial Sequence: Synthetic polypeptide
GSTSSTAESPGPGSTSSTAESPGPGSTSESPSGTAPGSTSSTAESPGPGSTSSTAESPGPGTSTPESGSASPGSTSESPSGTAPGTSPSGESSTAPGSTSESPSGTAPGSTSESPSGTAPGTSPSGESSTAPGSTSESPSGTAPGSTSESPSGTAPGTSPSGESSTAPGSTSESPSGTAPGSTSESPSGTAPGSTSESPSGTAPGTSTPESGSASPGSTSESPSGTAPGTSTPESGSASPGSTSSTAESPGPGSTSSTAESPGPGTSTPESGSASPGTSTPESGSASPGSTSESPSGTAPGTSTPESGSASPGTSTPESGSASPGSTSESPSGTAPGSTSESPSGTAPGSTSESPSGTAPGSTSSTAESPGPGTSTPESGSASPGTSTPESGSASPGSTSESPSGTAPGSTSESPSGTAPGTSTPESGSASPGSTSESPSGTAPGSTSESPSGTAPGTSTPESGSASPGTSPSGESSTAPGSTSSTAESPGPGTSPSGESSTAPGSTSSTAESPGPGTSTPESGSASPGSTSESPSGTAPGSTSSTAESPGPGTSTPESGSASPGTSTPESGSASPGFRVDEEFQSPFASQSRGYFLFRPRN

SEQ ID NO: 1390 - protein, 862 aa, Artificial Sequence
  Description of Artificial Sequence: Synthetic polypeptide
GSSESGSSEGGPGSSESGSSEGGPGESPGGSSGSESGSGGEPSESGSSGESPGGSSGSESGESPGGSSGSESGSSESGSSEGGPGSSESGSSEGGPGSSESGSSEGGPGESPGGSSGSESGESPGGSSGSESGESPGGSSGSESGSSESGSSEGGPGSSESGSSEGGPGSSESGSSEGGPGSSESGSSEGGPGSSESGSSEGGPGSSESGSSEGGPGSGGEPSESGSSGESPGGSSGSESGESPGGSSGSESGSGGEPSESGSSGSEGSSGPGESSGSSESGSSEGGPGSGGEPSESGSSGSEGSSGPGESSGSSESGSSEGGPGSGGEPSESGSSGESPGGSSGSESGSGGEPSESGSSGSGGEPSESGSSGSSESGSSEGGPGSGGEPSESGSSGSGGEPSESGSSGSEGSSGPGESSGESPGGSSGSESGSEGSSGPGESSGSEGSSGPGESSGSGGEPSESGSSGSSESGSSEGGPGSSESGSSEGGPGESPGGSSGSESGSGGEPSESGSSGSEGSSGPGESSGESPGGSSGSESGSEGSSGPGSSESGSSEGGPGSGGEPSESGSSGSEGSSGPGESSGSEGSSGPGESSGSEGSSGPGESSGSGGEPSESGSSGSGGEPSESGSSGESPGGSSGSESGESPGGSSGSESGSGGEPSESGSSGSEGSSGPGESSGESPGGSSGSESGSSESGSSEGGPGSSESGSSEGGPGSSESGSSEGGPGSGGEPSESGSSGSSESGSSEGGPGESPGGSSGSESGSGGEPSESGSSGSSESGSSEGGPGESPGGSSGSESGSGGEPSESGSSGESPGGSSGSESGSGGEPSESGSSGFRVDEEFQSPFASQSRGYFLFRPRN

SEQ ID NO: 1391 - protein, 890 aa, Artificial Sequence
  Description of Artificial Sequence: Synthetic polypeptide
GSPAGSPTSTEEGTSESATPESGPGTSTEPSEGSAPGSPAGSPTSTEEGTSTEPSEGSAPGTSTEPSEGSAPGTSESATPESGPGSEPATSGSETPGSEPATSGSETPGSPAGSPTSTEEGTSESATPESGPGTSTEPSEGSAPGTSTEPSEGSAPGSPAGSPTSTEEGTSTEPSEGSAPGTSTEPSEGSAPGTSESATPESGPGTSTEPSEGSAPGTSESATPESGPGSEPATSGSETPGTSTEPSEGSAPGTSTEPSEGSAPGTSESATPESGPGTSESATPESGPGSPAGSPTSTEEGTSESATPESGPGSEPATSGSETPGTSESATPESGPGTSTEPSEGSAPGTSTEPSEGSAPGTSTEPSEGSAPGTSTEPSEGSAPGTSTEPSEGSAPGTSTEPSEGSAPGSPAGSPTSTEEGTSTEPSEGSAPGTSESATPESGPGSEPATSGSETPGTSESATPESGPGSEPATSGSETPGTSESATPESGPGTSTEPSEGSAPGTSESATPESGPGSPAGSPTSTEEGSPAGSPTSTEEGSPAGSPTSTEEGTSESATPESGPGTSTEPSEGSAPGTSESATPESGPGSEPATSGSETPGTSESATPESGPGSEPATSGSETPGTSESATPESGPGTSTEPSEGSAPGSPAGSPTSTEEGTSESATPESGPGSEPATSGSETPGTSESATPESGPGSPAGSPTSTEEGSPAGSPTSTEEGTSTEPSEGSAPGTSESATPESGPGTSESATPESGPGTSESATPESGPGSEPATSGSETPGSEPATSGSETPGSPAGSPTSTEEGTSTEPSEGSAPGTSTEPSEGSAPGSEPATSGSETPGTSESATPESGPGTSTEPSEGSAPGFRVDEEFQSPFASQSRGYFLFRPRN

SEQ ID NO: 1392 - protein, 901 aa, Artificial Sequence
  Description of Artificial Sequence: Synthetic polypeptide
  MOD_RES (430)..(432): Any amino acid
  MOD_RES (443)..(446): Any amino acid
GSTSESPSGTAPGTSPSGESSTAPGSTSESPSGTAPGSTSESPSGTAPGTSTPESGSASPGTSTPESGSASPGSTSESPSGTAPGSTSESPSGTAPGTSPSGESSTAPGSTSESPSGTAPGTSPSGESSTAPGTSPSGESSTAPGSTSSTAESPGPGTSPSGESSTAPGTSPSGESSTAPGSTSSTAESPGPGTSTPESGSASPGTSTPESGSASPGSTSESPSGTAPGSTSESPSGTAPGTSTPESGSASPGSTSSTAESPGPGTSTPESGSASPGSTSESPSGTAPGTSPSGESSTAPGSTSSTAESPGPGTSPSGESSTAPGTSTPESGSASPGSTSSTAESPGPGSTSSTAESPGPGSTSSTAESPGPGSTSSTAESPGPGTSPSGESSTAPGSTSESPSGTAPGSTSESPSGTAPGTSTPESGPXXXGASASGAPSTXXXXSESPSGTAPGSTSESPSGTAPGSTSESPSGTAPGSTSESPSGTAPGSTSESPSGTAPGSTSESPSGTAPGTSTPESGSASPGTSPSGESSTAPGTSPSGESSTAPGSTSSTAESPGPGTSPSGESSTAPGTSTPESGSASPGSTSESPSGTAPGSTSESPSGTAPGTSPSGESSTAPGSTSESPSGTAPGTSTPESGSASPGTSTPESGSASPGSTSESPSGTAPGTSTPESGSASPGSTSSTAESPGPGSTSESPSGTAPGSTSESPSGTAPGTSPSGESSTAPGSTSSTAESPGPGTSPSGESSTAPGTSTPESGSASPGTSPSGESSTAPGTSPSGESSTAPGTSPSGESSTAPGSTSSTAESPGPGSTSSTAESPGPGTSPSGESSTAPGSSPSASTGTGPGSSTPSGATGSPGSSTPSGATGSPGFRVDEEFQSPFASQSRGYFLFRPRN

SEQ ID NO: 1393 - protein, 890 aa, Artificial Sequence
  Description of Artificial Sequence: Synthetic polypeptide
GASPGTSSTGSPGSSPSASTGTGPGSSPSASTGTGPGTPGSGTASSSPGSSTPSGATGSPGSNPSASTGTGPGASPGTSSTGSPGTPGSGTASSSPGSSTPSGATGSPGTPGSGTASSSPGASPGTSSTGSPGASPGTSSTGSPGTPGSGTASSSPGSSTPSGATGSPGASPGTSSTGSPGTPGSGTASSSPGSSTPSGATGSPGSNPSASTGTGPGSSPSASTGTGPGSSTPSGATGSPGSSTPSGATGSPGASPGTSSTGSPGASPGTSSTGSPGASPGTSSTGSPGTPGSGTASSSPGASPGTSSTGSPGASPGTSSTGSPGASPGTSSTGSPGSSPSASTGTGPGTPGSGTASSSPGASPGTSSTGSPGASPGTSSTGSPGASPGTSSTGSPGSSTPSGATGSPGSSTPSGATGSPGASPGTSSTGSPGTPGSGTASSSPGSSTPSGATGSPGSSTPSGATGSPGSSTPSGATGSPGSSPSASTGTGPGASPGTSSTGSPGASPGTSSTGSPGTPGSGTASSSPGASPGTSSTGSPGASPGTSSTGSPGASPGTSSTGSPGASPGTSSTGSPGTPGSGTASSSPGSSTPSGATGSPGTPGSGTASSSPGSSTPSGATGSPGTPGSGTASSSPGSSTPSGATGSPGSSTPSGATGSPGSSPSASTGTGPGSSPSASTGTGPGASPGTSSTGSPGTPGSGTASSSPGSSTPSGATGSPGSSPSASTGTGPGSSPSASTGTGPGASPGTSSTGSPGASPGTSSTGSPGSSTPSGATGSPGSSPSASTGTGPGASPGTSSTGSPGSSPSASTGTGPGTPGSGTASSSPGSSTPSGATGSPGSSTPSGATGSPGASPGTSSTGSPGFRVDEEFQSPFASQSRGYFLFRPRN

SEQ ID NO: 1394 - protein, 901 aa, Artificial Sequence
  Description of Artificial Sequence: Synthetic polypeptide
GTSTEPSEGSAPGSEPATSGSETPGSPAGSPTSTEEGSTSSTAESPGPGTSTPESGSASPGSTSESPSGTAPGSTSESPSGTAPGTSTPESGSASPGTSTPESGSASPGSEPATSGSETPGTSESATPESGPGSPAGSPTSTEEGTSTEPSEGSAPGTSESATPESGPGTSTEPSEGSAPGTSTEPSEGSAPGSPAGSPTSTEEGTSTEPSEGSAPGTSTEPSEGSAPGTSESATPESGPGTSESATPESGPGTSTEPSEGSAPGTSTEPSEGSAPGTSESATPESGPGTSTEPSEGSAPGSEPATSGSETPGSPAGSPTSTEEGSSTPSGATGSPGTPGSGTASSSPGSSTPSGATGSPGTSTEPSEGSAPGTSTEPSEGSAPGSEPATSGSETPGSPAGSPTSTEEGSPAGSPTSTEEGTSTEPSEGSAPGASASGAPSTGGTSESATPESGPGSPAGSPTSTEEGSPAGSPTSTEEGSTSSTAESPGPGSTSESPSGTAPGTSPSGESSTAPGTPGSGTASSSPGSSTPSGATGSPGSSPSASTGTGPGSEPATSGSETPGTSESATPESGPGSEPATSGSETPGSTSSTAESPGPGSTSSTAESPGPGTSPSGESSTAPGSEPATSGSETPGSEPATSGSETPGTSTEPSEGSAPGSTSSTAESPGPGTSTPESGSASPGSTSESPSGTAPGTSTEPSEGSAPGTSTEPSEGSAPGTSTEPSEGSAPGSSTPSGATGSPGSSPSASTGTGPGASPGTSSTGSPGSEPATSGSETPGTSESATPESGPGSPAGSPTSTEEGSSTPSGATGSPGSSPSASTGTGPGASPGTSSTGSPGTSESATPESGPGTSTEPSEGSAPGTSTEPSEGSAPGFRVDEEFQSPFASQSRGYFLFRPRN

SEQ ID NO: 1395 - protein, 182 aa, Artificial Sequence
  Description of Artificial Sequence: Synthetic polypeptide
HSQGTFTSDYSKYLDSRRAQDFVQWLMNTKRNRNNIAGGSEPATSGSETPGTSESATPESGPGSEPATSGSETPGSPAGSPTSTEEGTSTEPSEGSAPGSEPATSGSETPGSEPATSGSETPGSEPATSGSETPGTSTEPSEGSAPGTSESATPESGPGSEPATSGSETPGTSTEPSEGSAP

SEQ ID NO: 1396 - protein, 182 aa, Artificial Sequence
  Description of Artificial Sequence: Synthetic polypeptide
HSQGTFTSDYSKYLDSRRAQDFVQWLMNTKRNRNNIAGGTSTPESGSASPGTSPSGESSTAPGTSPSGESSTAPGSTSSTAESPGPGSTSESPSGTAPGSTSSTAESPGPGTSPSGESSTAPGTSTPESGSASPGSTSSTAESPGPGTSPSGESSTAPGTSPSGESSTAPGTSPSGESSTAP

SEQ ID NO: 1397 - protein, 326 aa, Artificial Sequence
  Description of Artificial Sequence: Synthetic polypeptide
HSQGTFTSDYSKYLDSRRAQDFVQWLMNTKRNRNNIAGGTSESATPESGPGSEPATSGSETPGTSESATPESGPGSEPATSGSETPGTSESATPESGPGTSTEPSEGSAPGSPAGSPTSTEEGTSESATPESGPGSEPATSGSETPGTSESATPESGPGSPAGSPTSTEEGSPAGSPTSTEEGTSTEPSEGSAPGTSESATPESGPGTSESATPESGPGTSESATPESGPGSEPATSGSETPGSEPATSGSETPGSPAGSPTSTEEGTSTEPSEGSAPGTSTEPSEGSAPGSEPATSGSETPGTSESATPESGPGTSTEPSEGSAP

SEQ ID NO: 1398 - protein, 614 aa, Artificial Sequence
  Description of Artificial Sequence: Synthetic polypeptide
HSQGTFTSDYSKYLDSRRAQDFVQWLMNTKRNRNNIAGGSPAGSPTSTEEGTSESATPESGPGTSTEPSEGSAPGSPAGSPTSTEEGTSTEPSEGSAPGTSTEPSEGSAPGTSESATPESGPGSEPATSGSETPGSEPATSGSETPGSPAGSPTSTEEGTSESATPESGPGTSTEPSEGSAPGTSTEPSEGSAPGSPAGSPTSTEEGTSTEPSEGSAPGTSTEPSEGSAPGTSESATPESGPGTSTEPSEGSAPGTSESATPESGPGSEPATSGSETPGTSTEPSEGSAPGTSTEPSEGSAPGTSESATPESGPGTSESATPESGPGSPAGSPTSTEEGTSESATPESGPGSEPATSGSETPGTSESATPESGPGTSTEPSEGSAPGTSTEPSEGSAPGTSTEPSEGSAPGTSTEPSEGSAPGTSTEPSEGSAPGTSTEPSEGSAPGSPAGSPTSTEEGTSTEPSEGSAPGTSESATPESGPGSEPATSGSETPGTSESATPESGPGSEPATSGSETPGTSESATPESGPGTSTEPSEGSAPGTSESATPESGPGSPAGSPTSTEEGSPAGSPTSTEEGSPAGSPTSTEEGTSESATPESGPGTSTEPSEGSAP

SEQ ID NO: 1399 - protein, 614 aa, Artificial Sequence
  Description of Artificial Sequence: Synthetic polypeptide
HSQGTFTSDYSKYLDSRRAQDFVQWLMNTKRNRNNIAGGSTSSTAESPGPGSTSSTAESPGPGSTSESPSGTAPGSTSSTAESPGPGSTSSTAESPGPGTSTPESGSASPGSTSESPSGTAPGTSPSGESSTAPGSTSESPSGTAPGSTSESPSGTAPGTSPSGESSTAPGSTSESPSGTAPGSTSESPSGTAPGTSPSGESSTAPGSTSESPSGTAPGSTSESPSGTAPGSTSESPSGTAPGTSTPESGSASPGSTSESPSGTAPGTSTPESGSASPGSTSSTAESPGPGSTSSTAESPGPGTSTPESGSASPGTSTPESGSASPGSTSESPSGTAPGTSTPESGSASPGTSTPESGSASPGSTSESPSGTAPGSTSESPSGTAPGSTSESPSGTAPGSTSSTAESPGPGTSTPESGSASPGTSTPESGSASPGSTSESPSGTAPGSTSESPSGTAPGTSTPESGSASPGSTSESPSGTAPGSTSESPSGTAPGTSTPESGSASPGTSPSGESSTAPGSTSSTAESPGPGTSPSGESSTAPGSTSSTAESPGPGTSTPESGSASPGSTSESPSGTAPGSTSSTAESPGPGTSTPESGSASPGTSTPESGSASP

SEQ ID NO: 1400 - protein, 874 aa, Artificial Sequence
  Description of Artificial Sequence: Synthetic polypeptide
HSQGTFTSDYSKYLDSRRAQDFVQWLMNTKRNRNNIAGGSSESGSSEGGPGSSESGSSEGGPGESPGGSSGSESGSGGEPSESGSSGESPGGSSGSESGESPGGSSGSESGSSESGSSEGGPGSSESGSSEGGPGSSESGSSEGGPGESPGGSSGSESGESPGGSSGSESGESPGGSSGSESGSSESGSSEGGPGSSESGSSEGGPGSSESGSSEGGPGSSESGSSEGGPGSSESGSSEGGPGSSESGSSEGGPGSGGEPSESGSSGESPGGSSGSESGESPGGSSGSESGSGGEPSESGSSGSEGSSGPGESSGSSESGSSEGGPGSGGEPSESGSSGSEGSSGPGESSGSSESGSSEGGPGSGGEPSESGSSGESPGGSSGSESGSGGEPSESGSSGSGGEPSESGSSGSSESGSSEGGPGSGGEPSESGSSGSGGEPSESGSSGSEGSSGPGESSGESPGGSSGSESGSEGSSGPGESSGSEGSSGPGESSGSGGEPSESGSSGSSESGSSEGGPGSSESGSSEGGPGESPGGSSGSESGSGGEPSESGSSGSEGSSGPGESSGESPGGSSGSESGSEGSSGPGSSESGSSEGGPGSGGEPSESGSSGSEGSSGPGESSGSEGSSGPGESSGSEGSSGPGESSGSGGEPSESGSSGSGGEPSESGSSGESPGGSSGSESGESPGGSSGSESGSGGEPSESGSSGSEGSSGPGESSGESPGGSSGSESGSSESGSSEGGPGSSESGSSEGGPGSSESGSSEGGPGSGGEPSESGSSGSSESGSSEGGPGESPGGSSGSESGSGGEPSESGSSGSSESGSSEGGPGESPGGSSGSESGSGGEPSESGSSGESPGGSSGSESGSGGEPSESGSS

SEQ ID NO: 1401 - protein, 902 aa, Artificial Sequence
  Description of Artificial Sequence: Synthetic polypeptide
HSQGTFTSDYSKYLDSRRAQDFVQWLMNTKRNRNNIAGGSPAGSPTSTEEGTSESATPESGPGTSTEPSEGSAPGSPAGSPTSTEEGTSTEPSEGSAPGTSTEPSEGSAPGTSESATPESGPGSEPATSGSETPGSEPATSGSETPGSPAGSPTSTEEGTSESATPESGPGTSTEPSEGSAPGTSTEPSEGSAPGSPAGSPTSTEEGTSTEPSEGSAPGTSTEPSEGSAPGTSESATPESGPGTSTEPSEGSAPGTSESATPESGPGSEPATSGSETPGTSTEPSEGSAPGTSTEPSEGSAPGTSESATPESGPGTSESATPESGPGSPAGSPTSTEEGTSESATPESGPGSEPATSGSETPGTSESATPESGPGTSTEPSEGSAPGTSTEPSEGSAPGTSTEPSEGSAPGTSTEPSEGSAPGTSTEPSEGSAPGTSTEPSEGSAPGSPAGSPTSTEEGTSTEPSEGSAPGTSESATPESGPGSEPATSGSETPGTSESATPESGPGSEPATSGSETPGTSESATPESGPGTSTEPSEGSAPGTSESATPESGPGSPAGSPTSTEEGSPAGSPTSTEEGSPAGSPTSTEEGTSESATPESGPGTSTEPSEGSAPGTSESATPESGPGSEPATSGSETPGTSESATPESGPGSEPATSGSETPGTSESATPESGPGTSTEPSEGSAPGSPAGSPTSTEEGTSESATPESGPGSEPATSGSETPGTSESATPESGPGSPAGSPTSTEEGSPAGSPTSTEEGTSTEPSEGSAPGTSESATPESGPGTSESATPESGPGTSESATPESGPGSEPATSGSETPGSEPATSGSETPGSPAGSPTSTEEGTSTEPSEGSAPGTSTEPSEGSAPGSEPATSGSETPGTSESATPESGPGTSTEPSEGSAP

SEQ ID NO: 1402 - protein, 913 aa, Artificial Sequence
  Description of Artificial Sequence: Synthetic polypeptide
  MOD_RES (468)..(470): Any amino acid
  MOD_RES (481)..(484): Any amino acid
HSQGTFTSDYSKYLDSRRAQDFVQWLMNTKRNRNNIAGGSTSESPSGTAPGTSPSGESSTAPGSTSESPSGTAPGSTSESPSGTAPGTSTPESGSASPGTSTPESGSASPGSTSESPSGTAPGSTSESPSGTAPGTSPSGESSTAPGSTSESPSGTAPGTSPSGESSTAPGTSPSGESSTAPGSTSSTAESPGPGTSPSGESSTAPGTSPSGESSTAPGSTSSTAESPGPGTSTPESGSASPGTSTPESGSASPGSTSESPSGTAPGSTSESPSGTAPGTSTPESGSASPGSTSSTAESPGPGTSTPESGSASPGSTSESPSGTAPGTSPSGESSTAPGSTSSTAESPGPGTSPSGESSTAPGTSTPESGSASPGSTSSTAESPGPGSTSSTAESPGPGSTSSTAESPGPGSTSSTAESPGPGTSPSGESSTAPGSTSESPSGTAPGSTSESPSGTAPGTSTPESGPXXXGASASGAPSTXXXXSESPSGTAPGSTSESPSGTAPGSTSESPSGTAPGSTSESPSGTAPGSTSESPSGTAPGSTSESPSGTAPGTSTPESGSASPGTSPSGESSTAPGTSPSGESSTAPGSTSSTAESPGPGTSPSGESSTAPGTSTPESGSASPGSTSESPSGTAPGSTSESPSGTAPGTSPSGESSTAPGSTSESPSGTAPGTSTPESGSASPGTSTPESGSASPGSTSESPSGTAPGTSTPESGSASPGSTSSTAESPGPGSTSESPSGTAPGSTSESPSGTAPGTSPSGESSTAPGSTSSTAESPGPGTSPSGESSTAPGTSTPESGSASPGTSPSGESSTAPGTSPSGESSTAPGTSPSGESSTAPGSTSSTAESPGPGSTSSTAESPGPGTSPSGESSTAPGSSPSASTGTGPGSSTPSGATGSPGSSTPSGATGSP

SEQ ID NO: 1403 - protein, 902 aa, Artificial Sequence
  Description of Artificial Sequence: Synthetic polypeptide
HSQGTFTSDYSKYLDSRRAQDFVQWLMNTKRNRNNIAGGASPGTSSTGSPGSSPSASTGTGPGSSPSASTGTGPGTPGSGTASSSPGSSTPSGATGSPGSNPSASTGTGPGASPGTSSTGSPGTPGSGTASSSPGSSTPSGATGSPGTPGSGTASSSPGASPGTSSTGSPGASPGTSSTGSPGTPGSGTASSSPGSSTPSGATGSPGASPGTSSTGSPGTPGSGTASSSPGSSTPSGATGSPGSNPSASTGTGPGSSPSASTGTGPGSSTPSGATGSPGSSTPSGATGSPGASPGTSSTGSPGASPGTSSTGSPGASPGTSSTGSPGTPGSGTASSSPGASPGTSSTGSPGASPGTSSTGSPGASPGTSSTGSPGSSPSASTGTGPGTPGSGTASSSPGASPGTSSTGSPGASPGTSSTGSPGASPGTSSTGSPGSSTPSGATGSPGSSTPSGATGSPGASPGTSSTGSPGTPGSGTASSSPGSSTPSGATGSPGSSTPSGATGSPGSSTPSGATGSPGSSPSASTGTGPGASPGTSSTGSPGASPGTSSTGSPGTPGSGTASSSPGASPGTSSTGSPGASPGTSSTGSPGASPGTSSTGSPGASPGTSSTGSPGTPGSGTASSSPGSSTPSGATGSPGTPGSGTASSSPGSSTPSGATGSPGTPGSGTASSSPGSSTPSGATGSPGSSTPSGATGSPGSSPSASTGTGPGSSPSASTGTGPGASPGTSSTGSPGTPGSGTASSSPGSSTPSGATGSPGSSPSASTGTGPGSSPSASTGTGPGASPGTSSTGSPGASPGTSSTGSPGSSTPSGATGSPGSSPSASTGTGPGASPGTSSTGSPGSSPSASTGTGPGTPGSGTASSSPGSSTPSGATGSPGSSTPSGATGSPGASPGTSSTGSP

SEQ ID NO: 1404 - protein, 913 aa, Artificial Sequence
  Description of Artificial Sequence: Synthetic polypeptide
HSQGTFTSDYSKYLDSRRAQDFVQWLMNTKRNRNNIAGGTSTEPSEGSAPGSEPATSGSETPGSPAGSPTSTEEGSTSSTAESPGPGTSTPESGSASPGSTSESPSGTAPGSTSESPSGTAPGTSTPESGSASPGTSTPESGSASPGSEPATSGSETPGTSESATPESGPGSPAGSPTSTEEGTSTEPSEGSAPGTSESATPESGPGTSTEPSEGSAPGTSTEPSEGSAPGSPAGSPTSTEEGTSTEPSEGSAPGTSTEPSEGSAPGTSESATPESGPGTSESATPESGPGTSTEPSEGSAPGTSTEPSEGSAPGTSESATPESGPGTSTEPSEGSAPGSEPATSGSETPGSPAGSPTSTEEGSSTPSGATGSPGTPGSGTASSSPGSSTPSGATGSPGTSTEPSEGSAPGTSTEPSEGSAPGSEPATSGSETPGSPAGSPTSTEEGSPAGSPTSTEEGTSTEPSEGSAPGASASGAPSTGGTSESATPESGPGSPAGSPTSTEEGSPAGSPTSTEEGSTSSTAESPGPGSTSESPSGTAPGTSPSGESSTAPGTPGSGTASSSPGSSTPSGATGSPGSSPSASTGTGPGSEPATSGSETPGTSESATPESGPGSEPATSGSETPGSTSSTAESPGPGSTSSTAESPGPGTSPSGESSTAPGSEPATSGSETPGSEPATSGSETPGTSTEPSEGSAPGSTSSTAESPGPGTSTPESGSASPGSTSESPSGTAPGTSTEPSEGSAPGTSTEPSEGSAPGTSTEPSEGSAPGSSTPSGATGSPGSSPSASTGTGPGASPGTSSTGSPGSEPATSGSETPGTSESATPESGPGSPAGSPTSTEEGSSTPSGATGSPGSSPSASTGTGPGASPGTSSTGSPGTSESATPESGPGTSTEPSEGSAPGTSTEPSEGSAP

SEQ ID NO: 1405 - protein, 1356 aa, Artificial Sequence
  Description of Artificial Sequence: Synthetic polypeptide
HSQGTFTSDYSKYLDSRRAQDFVQWLMNTKRNRNNIAGGTSTEPSEGSAPGSEPATSGSETPGSPAGSPTSTEEGSTSSTAESPGPGTSTPESGSASPGSTSESPSGTAPGSTSESPSGTAPGTSTPESGSASPGTSTPESGSASPGSEPATSGSETPGTSESATPESGPGSPAGSPTSTEEGTSTEPSEGSAPGTSESATPESGPGTSTEPSEGSAPGTSTEPSEGSAPGSPAGSPTSTEEGTSTEPSEGSAPGTSTEPSEGSAPGTSESATPESGPGTSESATPESGPGTSTEPSEGSAPGTSTEPSEGSAPGTSESATPESGPGTSTEPSEGSAPGSEPATSGSETPGSPAGSPTSTEEGSSTPSGATGSPGTPGSGTASSSPGSSTPSGATGSPGTSTEPSEGSAPGTSTEPSEGSAPGSEPATSGSETPGSPAGSPTSTEEGSPAGSPTSTEEGTSTEPSEGSAPGPEPTGPAPSGGSEPATSGSETPGTSESATPESGPGSPAGSPTSTEEGTSESATPESGPGSPAGSPTSTEEGSPAGSPTSTEEGTSESATPESGPGSPAGSPTSTEEGSPAGSPTSTEEGSTSSTAESPGPGSTSESPSGTAPGTSPSGESSTAPGSTSESPSGTAPGSTSESPSGTAPGTSPSGESSTAPGTSTEPSEGSAPGTSESATPESGPGTSESATPESGPGSEPATSGSETPGTSESATPESGPGTSESATPESGPGTSTEPSEGSAPGTSESATPESGPGTSTEPSEGSAPGTSPSGESSTAPGTSPSGESSTAPGTSPSGESSTAPGTSTEPSEGSAPGSPAGSPTSTEEGTSTEPSEGSAPGSSPSASTGTGPGSSTPSGATGSPGSSTPSGATGSPGSSTPSGATGSPGSSTPSGATGSPGASPGTSSTGSPGASASGAPSTGGTSPSGESSTAPGSTSSTAESPGPGTSPSGESSTAPGTSESATPESGPGTSTEPSEGSAPGTSTEPSEGSAPGSSPSASTGTGPGSSTPSGATGSPGASPGTSSTGSPGTSTPESGSASPGTSPSGESSTAPGTSPSGESSTAPGTSESATPESGPGSEPATSGSETPGTSTEPSEGSAPGSTSESPSGTAPGSTSESPSGTAPGTSTPESGSASPGSPAGSPTSTEEGTSESATPESGPGTSTEPSEGSAPGSPAGSPTSTEEGTSESATPESGPGSEPATSGSETPGSSTPSGATGSPGASPGTSSTGSPGSSTPSGATGSPGSTSESPSGTAPGTSPSGESSTAPGSTSSTAESPGPGSSTPSGATGSPGASPGTSSTGSPGTPGSGTASSSPGSPAGSPTSTEEGSPAGSPTSTEEGTSTEPSEGSAP

SEQ ID NO: 1406 - protein, 951 aa, Artificial Sequence
  Description of Artificial Sequence: Synthetic polypeptide
MAEPAGSPTSTEEGTPGSGTASSSPGSSTPSGATGSPGASPGTSSTGSPGSPAGSPTSTEEGTSESATPESGPGTSTEPSEGSAPGSPAGSPTSTEEGTSTEPSEGSAPGTSTEPSEGSAPGTSESATPESGPGSEPATSGSETPGSEPATSGSETPGSPAGSPTSTEEGTSESATPESGPGTSTEPSEGSAPGTSTEPSEGSAPGSPAGSPTSTEEGTSTEPSEGSAPGTSTEPSEGSAPGTSESATPESGPGTSTEPSEGSAPGTSESATPESGPGSEPATSGSETPGTSTEPSEGSAPGTSTEPSEGSAPGTSESATPESGPGTSESATPESGPGSPAGSPTSTEEGTSESATPESGPGSEPATSGSETPGTSESATPESGPGTSTEPSEGSAPGTSTEPSEGSAPGTSTEPSEGSAPGTSTEPSEGSAPGTSTEPSEGSAPGTSTEPSEGSAPGSPAGSPTSTEEGTSTEPSEGSAPGTSESATPESGPGSEPATSGSETPGTSESATPESGPGSEPATSGSETPGTSESATPESGPGTSTEPSEGSAPGTSESATPESGPGSPAGSPTSTEEGSPAGSPTSTEEGSPAGSPTSTEEGTSESATPESGPGTSTEPSEGSAPGTSESATPESGPGSEPATSGSETPGTSESATPESGPGSEPATSGSETPGTSESATPESGPGTSTEPSEGSAPGSPAGSPTSTEEGTSESATPESGPGSEPATSGSETPGTSESATPESGPGSPAGSPTSTEEGSPAGSPTSTEEGTSTEPSEGSAPGTSESATPESGPGTSESATPESGPGTSESATPESGPGSEPATSGSETPGSEPATSGSETPGSPAGSPTSTEEGTSTEPSEGSAPGTSTEPSEGSAPGSEPATSGSETPGTSESATPESGPGTSTEPSEGSAPGHSQGTFTSDYSKYLDSRRAQDFVQWLMNTKRNRNNIA

SEQ ID NO: 1407 - protein, 962 aa, Artificial Sequence
  Description of Artificial Sequence: Synthetic polypeptide
MAEPAGSPTSTEEGASPGTSSTGSPGSSTPSGATGSPGSSTPSGATGSPGTSTEPSEGSAPGSEPATSGSETPGSPAGSPTSTEEGSTSSTAESPGPGTSTPESGSASPGSTSESPSGTAPGSTSESPSGTAPGTSTPESGSASPGTSTPESGSASPGSEPATSGSETPGTSESATPESGPGSPAGSPTSTEEGTSTEPSEGSAPGTSESATPESGPGTSTEPSEGSAPGTSTEPSEGSAPGSPAGSPTSTEEGTSTEPSEGSAPGTSTEPSEGSAPGTSESATPESGPGTSESATPESGPGTSTEPSEGSAPGTSTEPSEGSAPGTSESATPESGPGTSTEPSEGSAPGSEPATSGSETPGSPAGSPTSTEEGSSTPSGATGSPGTPGSGTASSSPGSSTPSGATGSPGTSTEPSEGSAPGTSTEPSEGSAPGSEPATSGSETPGSPAGSPTSTEEGSPAGSPTSTEEGTSTEPSEGSAPGASASGAPSTGGTSESATPESGPGSPAGSPTSTEEGSPAGSPTSTEEGSTSSTAESPGPGSTSESPSGTAPGTSPSGESSTAPGTPGSGTASSSPGSSTPSGATGSPGSSPSASTGTGPGSEPATSGSETPGTSESATPESGPGSEPATSGSETPGSTSSTAESPGPGSTSSTAESPGPGTSPSGESSTAPGSEPATSGSETPGSEPATSGSETPGTSTEPSEGSAPGSTSSTAESPGPGTSTPESGSASPGSTSESPSGTAPGTSTEPSEGSAPGTSTEPSEGSAPGTSTEPSEGSAPGSSTPSGATGSPGSSPSASTGTGPGASPGTSSTGSPGSEPATSGSETPGTSESATPESGPGSPAGSPTSTEEGSSTPSGATGSPGSSPSASTGTGPGASPGTSSTGSPGTSESATPESGPGTSTEPSEGSAPGTSTEPSEGSAPGHSQGTFTSDYSKYLDSRRAQDFVQWLMNTKRNRNNIA

SEQ ID NO: 1408 - protein, 182 aa, Artificial Sequence
  Description of Artificial Sequence: Synthetic polypeptide
GSEPATSGSETPGTSESATPESGPGSEPATSGSETPGSPAGSPTSTEEGTSTEPSEGSAPGSEPATSGSETPGSEPATSGSETPGSEPATSGSETPGTSTEPSEGSAPGTSESATPESGPGSEPATSGSETPGTSTEPSEGSAPGHSQGTFTSDYSKYLDSRRAQDFVQWLMNTKRNRNNIA

SEQ ID NO: 1409 - protein, 182 aa, Artificial Sequence
  Description of Artificial Sequence: Synthetic polypeptide
GTSTPESGSASPGTSPSGESSTAPGTSPSGESSTAPGSTSSTAESPGPGSTSESPSGTAPGSTSSTAESPGPGTSPSGESSTAPGTSTPESGSASPGSTSSTAESPGPGTSPSGESSTAPGTSPSGESSTAPGTSPSGESSTAPGHSQGTFTSDYSKYLDSRRAQDFVQWLMNTKRNRNNIA

SEQ ID NO: 1410 - protein, 326 aa, Artificial Sequence
  Description of Artificial Sequence: Synthetic polypeptide
GTSESATPESGPGSEPATSGSETPGTSESATPESGPGSEPATSGSETPGTSESATPESGPGTSTEPSEGSAPGSPAGSPTSTEEGTSESATPESGPGSEPATSGSETPGTSESATPESGPGSPAGSPTSTEEGSPAGSPTSTEEGTSTEPSEGSAPGTSESATPESGPGTSESATPESGPGTSESATPESGPGSEPATSGSETPGSEPATSGSETPGSPAGSPTSTEEGTSTEPSEGSAPGTSTEPSEGSAPGSEPATSGSETPGTSESATPESGPGTSTEPSEGSAPGHSQGTFTSDYSKYLDSRRAQDFVQWLMNTKRNRNNIA

SEQ ID NO: 1411 - protein, 614 aa, Artificial Sequence
  Description of Artificial Sequence: Synthetic polypeptide
GSPAGSPTSTEEGTSESATPESGPGTSTEPSEGSAPGSPAGSPTSTEEGTSTEPSEGSAPGTSTEPSEGSAPGTSESATPESGPGSEPATSGSETPGSEPATSGSETPGSPAGSPTSTEEGTSESATPESGPGTSTEPSEGSAPGTSTEPSEGSAPGSPAGSPTSTEEGTSTEPSEGSAPGTSTEPSEGSAPGTSESATPESGPGTSTEPSEGSAPGTSESATPESGPGSEPATSGSETPGTSTEPSEGSAPGTSTEPSEGSAPGTSESATPESGPGTSESATPESGPGSPAGSPTSTEEGTSESATPESGPGSEPATSGSETPGTSESATPESGPGTSTEPSEGSAPGTSTEPSEGSAPGTSTEPSEGSAPGTSTEPSEGSAPGTSTEPSEGSAPGTSTEPSEGSAPGSPAGSPTSTEEGTSTEPSEGSAPGTSESATPESGPGSEPATSGSETPGTSESATPESGPGSEPATSGSETPGTSESATPESGPGTSTEPSEGSAPGTSESATPESGPGSPAGSPTSTEEGSPAGSPTSTEEGSPAGSPTSTEEGTSESATPESGPGTSTEPSEGSAPGHSQGTFTSDYSKYLDSRRAQDFVQWLMNTKRNRNNIA

SEQ ID NO: 1412 - protein, 614 aa, Artificial Sequence
  Description of Artificial Sequence: Synthetic polypeptide
GSTSSTAESPGPGSTSSTAESPGPGSTSESPSGTAPGSTSSTAESPGPGSTSSTAESPGPGTSTPESGSASPGSTSESPSGTAPGTSPSGESSTAPGSTSESPSGTAPGSTSESPSGTAPGTSPSGESSTAPGSTSESPSGTAPGSTSESPSGTAPGTSPSGESSTAPGSTSESPSGTAPGSTSESPSGTAPGSTSESPSGTAPGTSTPESGSASPGSTSESPSGTAPGTSTPESGSASPGSTSSTAESPGPGSTSSTAESPGPGTSTPESGSASPGTSTPESGSASPGSTSESPSGTAPGTSTPESGSASPGTSTPESGSASPGSTSESPSGTAPGSTSESPSGTAPGSTSESPSGTAPGSTSSTAESPGPGTSTPESGSASPGTSTPESGSASPGSTSESPSGTAPGSTSESPSGTAPGTSTPESGSASPGSTSESPSGTAPGSTSESPSGTAPGTSTPESGSASPGTSPSGESSTAPGSTSSTAESPGPGTSPSGESSTAPGSTSSTAESPGPGTSTPESGSASPGSTSESPSGTAPGSTSSTAESPGPGTSTPESGSASPGTSTPESGSASPGHSQGTFTSDYSKYLDSRRAQDFVQWLMNTKRNRNNIA

SEQ ID NO: 1413 - protein, 874 aa, Artificial Sequence
  Description of Artificial Sequence: Synthetic polypeptide
GSSESGSSEGGPGSSESGSSEGGPGESPGGSSGSESGSGGEPSESGSSGESPGGSSGSESGESPGGSSGSESGSSESGSSEGGPGSSESGSSEGGPGSSESGSSEGGPGESPGGSSGSESGESPGGSSGSESGESPGGSSGSESGSSESGSSEGGPGSSESGSSEGGPGSSESGSSEGGPGSSESGSSEGGPGSSESGSSEGGPGSSESGSSEGGPGSGGEPSESGSSGESPGGSSGSESGESPGGSSGSESGSGGEPSESGSSGSEGSSGPGESSGSSESGSSEGGPGSGGEPSESGSSGSEGSSGPGESSGSSESGSSEGGPGSGGEPSESGSSGESPGGSSGSESGSGGEPSESGSSGSGGEPSESGSSGSSESGSSEGGPGSGGEPSESGSSGSGGEPSESGSSGSEGSSGPGESSGESPGGSSGSESGSEGSSGPGESSGSEGSSGPGESSGSGGEPSESGSSGSSESGSSEGGPGSSESGSSEGGPGESPGGSSGSESGSGGEPSESGSSGSEGSSGPGESSGESPGGSSGSESGSEGSSGPGSSESGSSEGGPGSGGEPSESGSSGSEGSSGPGESSGSEGSSGPGESSGSEGSSGPGESSGSGGEPSESGSSGSGGEPSESGSSGESPGGSSGSESGESPGGSSGSESGSGGEPSESGSSGSEGSSGPGESSGESPGGSSGSESGSSESGSSEGGPGSSESGSSEGGPGSSESGSSEGGPGSGGEPSESGSSGSSESGSSEGGPGESPGGSSGSESGSGGEPSESGSSGSSESGSSEGGPGESPGGSSGSESGSGGEPSESGSSGESPGGSSGSESGSGGEPSESGSSGHSQGTFTSDYSKYLDSRRAQDFVQWLMNTKRNRNNIA

SEQ ID NO: 1414 - protein, 902 aa, Artificial Sequence
  Description of Artificial Sequence: Synthetic polypeptide
GSPAGSPTSTEEGTSESATPESGPGTSTEPSEGSAPGSPAGSPTSTEEGTSTEPSEGSAPGTSTEPSEGSAPGTSESATPESGPGSEPATSGSETPGSEPATSGSETPGSPAGSPTSTEEGTSESATPESGPGTSTEPSEGSAPGTSTEPSEGSAPGSPAGSPTSTEEGTSTEPSEGSAPGTSTEPSEGSAPGTSESATPESGPGTSTEPSEGSAPGTSESATPESGPGSEPATSGSETPGTSTEPSEGSAPGTSTEPSEGSAPGTSESATPESGPGTSESATPESGPGSPAGSPTSTEEGTSESATPESGPGSEPATSGSETPGTSESATPESGPGTSTEPSEGSAPGTSTEPSEGSAPGTSTEPSEGSAPGTSTEPSEGSAPGTSTEPSEGSAPGTSTEPSEGSAPGSPAGSPTSTEEGTSTEPSEGSAPGTSESATPESGPGSEPATSGSETPGTSESATPESGPGSEPATSGSETPGTSESATPESGPGTSTEPSEGSAPGTSESATPESGPGSPAGSPTSTEEGSPAGSPTSTEEGSPAGSPTSTEEGTSESATPESGPGTSTEPSEGSAPGTSESATPESGPGSEPATSGSETPGTSESATPESGPGSEPATSGSETPGTSESATPESGPGTSTEPSEGSAPGSPAGSPTSTEEGTSESATPESGPGSEPATSGSETPGTSESATPESGPGSPAGSPTSTEEGSPAGSPTSTEEGTSTEPSEGSAPGTSESATPESGPGTSESATPESGPGTSESATPESGPGSEPATSGSETPGSEPATSGSETPGSPAGSPTSTEEGTSTEPSEGSAPGTSTEPSEGSAPGSEPATSGSETPGTSESATPESGPGTSTEPSEGSAPGHSQGTFTSDYSKYLDSRRAQDFVQWLMNTKRNRNNIA

SEQ ID NO: 1415 - protein, 913 aa, Artificial Sequence
  Description of Artificial Sequence: Synthetic polypeptide
  MOD_RES (430)..(432): Any amino acid
  MOD_RES (443)..(446): Any amino acid
GSTSESPSGTAPGTSPSGESSTAPGSTSESPSGTAPGSTSESPSGTAPGTSTPESGSASPGTSTPESGSASPGSTSESPSGTAPGSTSESPSGTAPGTSPSGESSTAPGSTSESPSGTAPGTSPSGESSTAPGTSPSGESSTAPGSTSSTAESPGPGTSPSGESSTAPGTSPSGESSTAPGSTSSTAESPGPGTSTPESGSASPGTSTPESGSASPGSTSESPSGTAPGSTSESPSGTAPGTSTPESGSASPGSTSSTAESPGPGTSTPESGSASPGSTSESPSGTAPGTSPSGESSTAPGSTSSTAESPGPGTSPSGESSTAPGTSTPESGSASPGSTSSTAESPGPGSTSSTAESPGPGSTSSTAESPGPGSTSSTAESPGPGTSPSGESSTAPGSTSESPSGTAPGSTSESPSGTAPGTSTPESGPXXXGASASGAPSTXXXXSESPSGTAPGSTSESPSGTAPGSTSESPSGTAPGSTSESPSGTAPGSTSESPSGTAPGSTSESPSGTAPGTSTPESGSASPGTSPSGESSTAPGTSPSGESSTAPGSTSSTAESPGPGTSPSGESSTAPGTSTPESGSASPGSTSESPSGTAPGSTSESPSGTAPGTSPSGESSTAPGSTSESPSGTAPGTSTPESGSASPGTSTPESGSASPGSTSESPSGTAPGTSTPESGSASPGSTSSTAESPGPGSTSESPSGTAPGSTSESPSGTAPGTSPSGESSTAPGSTSSTAESPGPGTSPSGESSTAPGTSTPESGSASPGTSPSGESSTAPGTSPSGESSTAPGTSPSGESSTAPGSTSSTAESPGPGSTSSTAESPGPGTSPSGESSTAPGSSPSASTGTGPGSSTPSGATGSPGSSTPSGATGSPGHSQGTFTSDYSKYLDSRRAQDFVQWLMNTKRNRNNIA

SEQ ID NO: 1416 - protein, 902 aa, Artificial Sequence
  Description of Artificial Sequence: Synthetic polypeptide
GASPGTSSTGSPGSSPSASTGTGPGSSPSASTGTGPGTPGSGTASSSPGSSTPSGATGSPGSNPSASTGTGPGASPGTSSTGSPGTPGSGTASSSPGSSTPSGATGSPGTPGSGTASSSPGASPGTSSTGSPGASPGTSSTGSPGTPGSGTASSSPGSSTPSGATGSPGASPGTSSTGSPGTPGSGTASSSPGSSTPSGATGSPGSNPSASTGTGPGSSPSASTGTGPGSSTPSGATGSPGSSTPSGATGSPGASPGTSSTGSPGASPGTSSTGSPGASPGTSSTGSPGTPGSGTASSSPGASPGTSSTGSPGASPGTSSTGSPGASPGTSSTGSPGSSPSASTGTGPGTPGSGTASSSPGASPGTSSTGSPGASPGTSSTGSPGASPGTSSTGSPGSSTPSGATGSPGSSTPSGATGSPGASPGTSSTGSPGTPGSGTASSSPGSSTPSGATGSPGSSTPSGATGSPGSSTPSGATGSPGSSPSASTGTGPGASPGTSSTGSPGASPGTSSTGSPGTPGSGTASSSPGASPGTSSTGSPGASPGTSSTGSPGASPGTSSTGSPGASPGTSSTGSPGTPGSGTASSSPGSSTPSGATGSPGTPGSGTASSSPGSSTPSGATGSPGTPGSGTASSSPGSSTPSGATGSPGSSTPSGATGSPGSSPSASTGTGPGSSPSASTGTGPGASPGTSSTGSPGTPGSGTASSSPGSSTPSGATGSPGSSPSASTGTGPGSSPSASTGTGPGASPGTSSTGSPGASPGTSSTGSPGSSTPSGATGSPGSSPSASTGTGPGASPGTSSTGSPGSSPSASTGTGPGTPGSGTASSSPGSSTPSGATGSPGSSTPSGATGSPGASPGTSSTGSPGHSQGTFTSDYSKYLDSRRAQDFVQWLMNTKRNRNNIA

SEQ ID NO: 1417 - protein, 913 aa, Artificial Sequence
  Description of Artificial Sequence: Synthetic polypeptide
GTSTEPSEGSAPGSEPATSGSETPGSPAGSPTSTEEGSTSSTAESPGPGTSTPESGSASPGSTSESPSGTAPGSTSESPSGTAPGTSTPESGSASPGTSTPESGSASPGSEPATSGSETPGTSESATPESGPGSPAGSPTSTEEGTSTEPSEGSAPGTSESATPESGPGTSTEPSEGSAPGTSTEPSEGSAPGSPAGSPTSTEEGTSTEPSEGSAPGTSTEPSEGSAPGTSESATPESGPGTSESATPESGPGTSTEPSEGSAPGTSTEPSEGSAPGTSESATPESGPGTSTEPSEGSAPGSEPATSGSETPGSPAGSPTSTEEGSSTPSGATGSPGTPGSGTASSSPGSSTPSGATGSPGTSTEPSEGSAPGTSTEPSEGSAPGSEPATSGSETPGSPAGSPTSTEEGSPAGSPTSTEEGTSTEPSEGSAPGASASGAPSTGGTSESATPESGPGSPAGSPTSTEEGSPAGSPTSTEEGSTSSTAESPGPGSTSESPSGTAPGTSPSGESSTAPGTPGSGTASSSPGSSTPSGATGSPGSSPSASTGTGPGSEPATSGSETPGTSESATPESGPGSEPATSGSETPGSTSSTAESPGPGSTSSTAESPGPGTSPSGESSTAPGSEPATSGSETPGSEPATSGSETPGTSTEPSEGSAPGSTSSTAESPGPGTSTPESGSASPGSTSESPSGTAPGTSTEPSEGSAPGTSTEPSEGSAPGTSTEPSEGSAPGSSTPSGATGSPGSSPSASTGTGPGASPGTSSTGSPGSEPATSGSETPGTSESATPESGPGSPAGSPTSTEEGSSTPSGATGSPGSSPSASTGTGPGASPGTSSTGSPGTSESATPESGPGTSTEPSEGSAPGTSTEPSEGSAPGHSQGTFTSDYSKYLDSRRAQDFVQWLMNTKRNRNNIA

SEQ ID NO: 1418 - protein, 1356 aa, Artificial Sequence
  Description of Artificial Sequence: Synthetic polypeptide
GTSTEPSEGSAPGSEPATSGSETPGSPAGSPTSTEEGSTSSTAESPGPGTSTPESGSASPGSTSESPSGTAPGSTSESPSGTAPGTSTPESGSASPGTSTPESGSASPGSEPATSGSETPGTSESATPESGPGSPAGSPTSTEEGTSTEPSEGSAPGTSESATPESGPGTSTEPSEGSAPGTSTEPSEGSAPGSPAGSPTSTEEGTSTEPSEGSAPGTSTEPSEGSAPGTSESATPESGPGTSESATPESGPGTSTEPSEGSAPGTSTEPSEGSAPGTSESATPESGPGTSTEPSEGSAPGSEPATSGSETPGSPAGSPTSTEEGSSTPSGATGSPGTPGSGTASSSPGSSTPSGATGSPGTSTEPSEGSAPGTSTEPSEGSAPGSEPATSGSETPGSPAGSPTSTEEGSPAGSPTSTEEGTSTEPSEGSAPGPEPTGPAPSGGSEPATSGSETPGTSESATPESGPGSPAGSPTSTEEGTSESATPESGPGSPAGSPTSTEEGSPAGSPTSTEEGTSESATPESGPGSPAGSPTSTEEGSPAGSPTSTEEGSTSSTAESPGPGSTSESPSGTAPGTSPSGESSTAPGSTSESPSGTAPGSTSESPSGTAPGTSPSGESSTAPGTSTEPSEGSAPGTSESATPESGPGTSESATPESGPGSEPATSGSETPGTSESATPESGPGTSESATPESGPGTSTEPSEGSAPGTSESATPESGPGTSTEPSEGSAPGTSPSGESSTAPGTSPSGESSTAPGTSPSGESSTAPGTSTEPSEGSAPGSPAGSPTSTEEGTSTEPSEGSAPGSSPSASTGTGPGSSTPSGATGSPGSSTPSGATGSPGSSTPSGATGSPGSSTPSGATGSPGASPGTSSTGSPGASASGAPSTGGTSPSGESSTAPGSTSSTAESPGPGTSPSGESSTAPGTSESATPESGPGTSTEPSEGSAPGTSTEPSEGSAPGSSPSASTGTGPGSSTPSGATGSPGASPGTSSTGSPGTSTPESGSASPGTSPSGESSTAPGTSPSGESSTAPGTSESATPESGPGSEPATSGSETPGTSTEPSEGSAPGSTSESPSGTAPGSTSESPSGTAPGTSTPESGSASPGSPAGSPTSTEEGTSESATPESGPGTSTEPSEGSAPGSPAGSPTSTEEGTSESATPESGPGSEPATSGSETPGSSTPSGATGSPGASPGTSSTGSPGSSTPSGATGSPGSTSESPSGTAPGTSPSGESSTAPGSTSSTAESPGPGSSTPSGATGSPGASPGTSSTGSPGTPGSGTASSSPGSPAGSPTSTEEGSPAGSPTSTEEGTSTEPSEGSAPGHSQGTFTSDYSKYLDSRRAQDFVQWLMNTKRNRNNIA

SEQ ID NO: 1419 - protein, 181 aa, Artificial Sequence
  Description of Artificial Sequence: Synthetic polypeptide
YPIKPEAPGEDASPEELNRYYASLRHYLNLVTRQRYGGSEPATSGSETPGTSESATPESGPGSEPATSGSETPGSPAGSPTSTEEGTSTEPSEGSAPGSEPATSGSETPGSEPATSGSETPGSEPATSGSETPGTSTEPSEGSAPGTSESATPESGPGSEPATSGSETPGTSTEPSEGSAP

SEQ ID NO: 1420 - protein, 181 aa, Artificial Sequence
  Description of Artificial Sequence: Synthetic polypeptide
YPIKPEAPGEDASPEELNRYYASLRHYLNLVTRQRYGGTSTPESGSASPGTSPSGESSTAPGTSPSGESSTAPGSTSSTAESPGPGSTSESPSGTAPGSTSSTAESPGPGTSPSGESSTAPGTSTPESGSASPGSTSSTAESPGPGTSPSGESSTAPGTSPSGESSTAPGTSPSGESSTAP

SEQ ID NO: 1421 - protein, 325 aa, Artificial Sequence
  Description of Artificial Sequence: Synthetic polypeptide
YPIKPEAPGEDASPEELNRYYASLRHYLNLVTRQRYGGTSESATPESGPGSEPATSGSETPGTSESATPESGPGSEPATSGSETPGTSESATPESGPGTSTEPSEGSAPGSPAGSPTSTEEGTSESATPESGPGSEPATSGSETPGTSESATPESGPGSPAGSPTSTEEGSPAGSPTSTEEGTSTEPSEGSAPGTSESATPESGPGTSESATPESGPGTSESATPESGPGSEPATSGSETPGSEPATSGSETPGSPAGSPTSTEEGTSTEPSEGSAPGTSTEPSEGSAPGSEPATSGSETPGTSESATPESGPGTSTEPSEGSAP

SEQ ID NO: 1422 - protein, 613 aa, Artificial Sequence
  Description of Artificial Sequence: Synthetic polypeptide
YPIKPEAPGEDASPEELNRYYASLRHYLNLVTRQRYGGSPAGSPTSTEEGTSESATPESGPGTSTEPSEGSAPGSPAGSPTSTEEGTSTEPSEGSAPGTSTEPSEGSAPGTSESATPESGPGSEPATSGSETPGSEPATSGSETPGSPAGSPTSTEEGTSESATPESGPGTSTEPSEGSAPGTSTEPSEGSAPGSPAGSPTSTEEGTSTEPSEGSAPGTSTEPSEGSAPGTSESATPESGPGTSTEPSEGSAPGTSESATPESGPGSEPATSGSETPGTSTEPSEGSAPGTSTEPSEGSAPGTSESATPESGPGTSESATPESGPGSPAGSPTSTEEGTSESATPESGPGSEPATSGSETPGTSESATPESGPGTSTEPSEGSAPGTSTEPSEGSAPGTSTEPSEGSAPGTSTEPSEGSAPGTSTEPSEGSAPGTSTEPSEGSAPGSPAGSPTSTEEGTSTEPSEGSAPGTSESATPESGPGSEPATSGSETPGTSESATPESGPGSEPATSGSETPGTSESATPESGPGTSTEPSEGSAPGTSESATPESGPGSPAGSPTSTEEGSPAGSPTSTEEGSPAGSPTSTEEGTSESATPESGPGTSTEPSEGSAP

SEQ ID NO: 1423 - protein, 613 aa, Artificial Sequence
  Description of Artificial Sequence: Synthetic polypeptide
YPIKPEAPGEDASPEELNRYYASLRHYLNLVTRQRYGGSTSSTAESPGPGSTSSTAESPGPGSTSESPSGTAPGSTSSTAESPGPGSTSSTAESPGPGTSTPESGSASPGSTSESPSGTAPGTSPSGESSTAPGSTSESPSGTAPGSTSESPSGTAPGTSPSGESSTAPGSTSESPSGTAPGSTSESPSGTAPGTSPSGESSTAPGSTSESPSGTAPGSTSESPSGTAPGSTSESPSGTAPGTSTPESGSASPGSTSESPSGTAPGTSTPESGSASPGSTSSTAESPGPGSTSSTAESPGPGTSTPESGSASPGTSTPESGSASPGSTSESPSGTAPGTSTPESGSASPGTSTPESGSASPGSTSESPSGTAPGSTSESPSGTAPGSTSESPSGTAPGSTSSTAESPGPGTSTPESGSASPGTSTPESGSASPGSTSESPSGTAPGSTSESPSGTAPGTSTPESGSASPGSTSESPSGTAPGSTSESPSGTAPGTSTPESGSASPGTSPSGESSTAPGSTSSTAESPGPGTSPSGESSTAPGSTSSTAESPGPGTSTPESGSASPGSTSESPSGTAPGSTSSTAESPGPGTSTPESGSASPGTSTPESGSASP

SEQ ID NO: 1424 - protein, 873 aa, Artificial Sequence
  Description of Artificial Sequence: Synthetic polypeptide
YPIKPEAPGEDASPEELNRYYASLRHYLNLVTRQRYGGSSESGSSEGGPGSSESGSSEGGPGESPGGSSGSESGSGGEPSESGSSGESPGGSSGSESGESPGGSSGSESGSSESGSSEGGPGSSESGSSEGGPGSSESGSSEGGPGESPGGSSGSESGESPGGSSGSESGESPGGSSGSESGSSESGSSEGGPGSSESGSSEGGPGSSESGSSEGGPGSSESGSSEGGPGSSESGSSEGGPGSSESGSSEGGPGSGGEPSESGSSGESPGGSSGSESGESPGGSSGSESGSGGEPSESGSSGSEGSSGPGESSGSSESGSSEGGPGSGGEPSESGSSGSEGSSGPGESSGSSESGSSEGGPGSGGEPSESGSSGESPGGSSGSESGSGGEPSESGSSGSGGEPSESGSSGSSESGSSEGGPGSGGEPSESGSSGSGGEPSESGSSGSEGSSGPGESSGESPGGSSGSESGSEGSSGPGESSGSEGSSGPGESSGSGGEPSESGSSGSSESGSSEGGPGSSESGSSEGGPGESPGGSSGSESGSGGEPSESGSSGSEGSSGPGESSGESPGGSSGSESGSEGSSGPGSSESGSSEGGPGSGGEPSESGSSGSEGSSGPGESSGSEGSSGPGESSGSEGSSGPGESSGSGGEPSESGSSGSGGEPSESGSSGESPGGSSGSESGESPGGSSGSESGSGGEPSESGSSGSEGSSGPGESSGESPGGSSGSESGSSESGSSEGGPGSSESGSSEGGPGSSESGSSEGGPGSGGEPSESGSSGSSESGSSEGGPGESPGGSSGSESGSGGEPSESGSSGSSESGSSEGGPGESPGGSSGSESGSGGEPSESGSSGESPGGSSGSESGSGGEPSESGSS

SEQ ID NO: 1425 - protein, 901 aa, Artificial Sequence
  Description of Artificial Sequence: Synthetic polypeptide
YPIKPEAPGEDASPEELNRYYASLRHYLNLVTRQRYGGSPAGSPTSTEEGTSESATPESGPGTSTEPSEGSAPGSPAGSPTSTEEGTSTEPSEGSAPGTSTEPSEGSAPGTSESATPESGPGSEPATSGSETPGSEPATSGSETPGSPAGSPTSTEEGTSESATPESGPGTSTEPSEGSAPGTSTEPSEGSAPGSPAGSPTSTEEGTSTEPSEGSAPGTSTEPSEGSAPGTSESATPESGPGTSTEPSEGSAPGTSESATPESGPGSEPATSGSETPGTSTEPSEGSAPGTSTEPSEGSAPGTSESATPESGPGTSESATPESGPGSPAGSPTSTEEGTSESATPESGPGSEPATSGSETPGTSESATPESGPGTSTEPSEGSAPGTSTEPSEGSAPGTSTEPSEGSAPGTSTEPSEGSAPGTSTEPSEGSAPGTSTEPSEGSAPGSPAGSPTSTEEGTSTEPSEGSAPGTSESATPESGPGSEPATSGSETPGTSESATPESGPGSEPATSGSETPGTSESATPESGPGTSTEPSEGSAPGTSESATPESGPGSPAGSPTSTEEGSPAGSPTSTEEGSPAGSPTSTEEGTSESATPESGPGTSTEPSEGSAPGTSESATPESGPGSEPATSGSETPGTSESATPESGPGSEPATSGSETPGTSESATPESGPGTSTEPSEGSAPGSPAGSPTSTEEGTSESATPESGPGSEPATSGSETPGTSESATPESGPGSPAGSPTSTEEGSPAGSPTSTEEGTSTEPSEGSAPGTSESATPESGPGTSESATPESGPGTSESATPESGPGSEPATSGSETPGSEPATSGSETPGSPAGSPTSTEEGTSTEPSEGSAPGTSTEPSEGSAPGSEPATSGSETPGTSESATPESGPGTSTEPSEGSAP

SEQ ID NO: 1426 - protein, 912 aa, Artificial Sequence
  Description of Artificial Sequence: Synthetic polypeptide
  MOD_RES (467)..(469): Any amino acid
  MOD_RES (480)..(483): Any amino acid
YPIKPEAPGEDASPEELNRYYASLRHYLNLVTRQRYGGSTSESPSGTAPGTSPSGESSTAPGSTSESPSGTAPGSTSESPSGTAPGTSTPESGSASPGTSTPESGSASPGSTSESPSGTAPGSTSESPSGTAPGTSPSGESSTAPGSTSESPSGTAPGTSPSGESSTAPGTSPSGESSTAPGSTSSTAESPGPGTSPSGESSTAPGTSPSGESSTAPGSTSSTAESPGPGTSTPESGSASPGTSTPESGSASPGSTSESPSGTAPGSTSESPSGTAPGTSTPESGSASPGSTSSTAESPGPGTSTPESGSASPGSTSESPSGTAPGTSPSGESSTAPGSTSSTAESPGPGTSPSGESSTAPGTSTPESGSASPGSTSSTAESPGPGSTSSTAESPGPGSTSSTAESPGPGSTSSTAESPGPGTSPSGESSTAPGSTSESPSGTAPGSTSESPSGTAPGTSTPESGPXXXGASASGAPSTXXXXSESPSGTAPGSTSESPSGTAPGSTSESPSGTAPGSTSESPSGTAPGSTSESPSGTAPGSTSESPSGTAPGTSTPESGSASPGTSPSGESSTAPGTSPSGESSTAPGSTSSTAESPGPGTSPSGESSTAPGTSTPESGSASPGSTSESPSGTAPGSTSESPSGTAPGTSPSGESSTAPGSTSESPSGTAPGTSTPESGSASPGTSTPESGSASPGSTSESPSGTAPGTSTPESGSASPGSTSSTAESPGPGSTSESPSGTAPGSTSESPSGTAPGTSPSGESSTAPGSTSSTAESPGPGTSPSGESSTAPGTSTPESGSASPGTSPSGESSTAPGTSPSGESSTAPGTSPSGESSTAPGSTSSTAESPGPGSTSSTAESPGPGTSPSGESSTAPGSSPSASTGTGPGSSTPSGATGSPGSSTPSGATGSP

SEQ ID NO: 1427 - protein, 901 aa, Artificial Sequence
  Description of Artificial Sequence: Synthetic polypeptide
YPIKPEAPGEDASPEELNRYYASLRHYLNLVTRQRYGGASPGTSSTGSPGSSPSASTGTGPGSSPSASTGTGPGTPGSGTASSSPGSSTPSGATGSPGSNPSASTGTGPGASPGTSSTGSPGTPGSGTASSSPGSSTPSGATGSPGTPGSGTASSSPGASPGTSSTGSPGASPGTSSTGSPGTPGSGTASSSPGSSTPSGATGSPGASPGTSSTGSPGTPGSGTASSSPGSSTPSGATGSPGSNPSASTGTGPGSSPSASTGTGPGSSTPSGATGSPGSSTPSGATGSPGASPGTSSTGSPGASPGTSSTGSPGASPGTSSTGSPGTPGSGTASSSPGASPGTSSTGSPGASPGTSSTGSPGASPGTSSTGSPGSSPSASTGTGPGTPGSGTASSSPGASPGTSSTGSPGASPGTSSTGSPGASPGTSSTGSPGSSTPSGATGSPGSSTPSGATGSPGASPGTSSTGSPGTPGSGTASSSPGSSTPSGATGSPGSSTPSGATGSPGSSTPSGATGSPGSSPSASTGTGPGASPGTSSTGSPGASPGTSSTGSPGTPGSGTASSSPGASPGTSSTGSPGASPGTSSTGSPGASPGTSSTGSPGASPGTSSTGSPGTPGSGTASSSPGSSTPSGATGSPGTPGSGTASSSPGSSTPSGATGSPGTPGSGTASSSPGSSTPSGATGSPGSSTPSGATGSPGSSPSASTGTGPGSSPSASTGTGPGASPGTSSTGSPGTPGSGTASSSPGSSTPSGATGSPGSSPSASTGTGPGSSPSASTGTGPGASPGTSSTGSPGASPGTSSTGSPGSSTPSGATGSPGSSPSASTGTGPGASPGTSSTGSPGSSPSASTGTGPGTPGSGTASSSPGSSTPSGATGSPGSSTPSGATGSPGASPGTSSTGSP

SEQ ID NO: 1428 - protein, 912 aa, Artificial Sequence
  Description of Artificial Sequence: Synthetic polypeptide
YPIKPEAPGEDASPEELNRYYASLRHYLNLVTRQRYGGTSTEPSEGSAPGSEPATSGSETPGSPAGSPTSTEEGSTSSTAESPGPGTSTPESGSASPGSTSESPSGTAPGSTSESPSGTAPGTSTPESGSASPGTSTPESGSASPGSEPATSGSETPGTSESATPESGPGSPAGSPTSTEEGTSTEPSEGSAPGTSESATPESGPGTSTEPSEGSAPGTSTEPSEGSAPGSPAGSPTSTEEGTSTEPSEGSAPGTSTEPSEGSAPGTSESATPESGPGTSESATPESGPGTSTEPSEGSAPGTSTEPSEGSAPGTSESATPESGPGTSTEPSEGSAPGSEPATSGSETPGSPAGSPTSTEEGSSTPSGATGSPGTPGSGTASSSPGSSTPSGATGSPGTSTEPSEGSAPGTSTEPSEGSAPGSEPATSGSETPGSPAGSPTSTEEGSPAGSPTSTEEGTSTEPSEGSAPGASASGAPSTGGTSESATPESGPGSPAGSPTSTEEGSPAGSPTSTEEGSTSSTAESPGPGSTSESPSGTAPGTSPSGESSTAPGTPGSGTASSSPGSSTPSGATGSPGSSPSASTGTGPGSEPATSGSETPGTSESATPESGPGSEPATSGSETPGSTSSTAESPGPGSTSSTAESPGPGTSPSGESSTAPGSEPATSGSETPGSEPATSGSETPGTSTEPSEGSAPGSTSSTAESPGPGTSTPESGSASPGSTSESPSGTAPGTSTEPSEGSAPGTSTEPSEGSAPGTSTEPSEGSAPGSSTPSGATGSPGSSPSASTGTGPGASPGTSSTGSPGSEPATSGSETPGTSESATPESGPGSPAGSPTSTEEGSSTPSGATGSPGSSPSASTGTGPGASPGTSSTGSPGTSESATPESGPGTSTEPSEGSAPGTSTEPSEGSAP

SEQ ID NO: 1429 - protein, 1355 aa, Artificial Sequence
  Description of Artificial Sequence: Synthetic polypeptide
YPIKPEAPGEDASPEELNRYYASLRHYLNLVTRQRYGGTSTEPSEGSAPGSEPATSGSETPGSPAGSPTSTEEGSTSSTAESPGPGTSTPESGSASPGSTSESPSGTAPGSTSESPSGTAPGTSTPESGSASPGTSTPESGSASPGSEPATSGSETPGTSESATPESGPGSPAGSPTSTEEGTSTEPSEGSAPGTSESATPESGPGTSTEPSEGSAPGTSTEPSEGSAPGSPAGSPTSTEEGTSTEPSEGSAPGTSTEPSEGSAPGTSESATPESGPGTSESATPESGPGTSTEPSEGSAPGTSTEPSEGSAPGTSESATPESGPGTSTEPSEGSAPGSEPATSGSETPGSPAGSPTSTEEGSSTPSGATGSPGTPGSGTASSSPGSSTPSGATGSPGTSTEPSEGSAPGTSTEPSEGSAPGSEPATSGSETPGSPAGSPTSTEEGSPAGSPTSTEEGTSTEPSEGSAPGPEPTGPAPSGGSEPATSGSETPGTSESATPESGPGSPAGSPTSTEEGTSESATPESGPGSPAGSPTSTEEGSPAGSPTSTEEGTSESATPESGPGSPAGSPTSTEEGSPAGSPTSTEEGSTSSTAESPGPGSTSESPSGTAPGTSPSGESSTAPGSTSESPSGTAPGSTSESPSGTAPGTSPSGESSTAPGTSTEPSEGSAPGTSESATPESGPGTSESATPESGPGSEPATSGSETPGTSESATPESGPGTSESATPESGPGTSTEPSEGSAPGTSESATPESGPGTSTEPSEGSAPGTSPSGESSTAPGTSPSGESSTAPGTSPSGESSTAPGTSTEPSEGSAPGSPAGSPTSTEEGTSTEPSEGSAPGSSPSASTGTGPGSSTPSGATGSPGSSTPSGATGSPGSSTPSGATGSPGSSTPSGATGSPGASPGTSSTGSPGASASGAPSTGGTSPSGESSTAPGSTSSTAESPGPGTSPSGESSTAPGTSESATPESGPGTSTEPSEGSAPGTSTEPSEGSAPGSSPSASTGTGPGSSTPSGATGSPGASPGTSSTGSPGTSTPESGSASPGTSPSGESSTAPGTSPSGESSTAPGTSESATPESGPGSEPATSGSETPGTSTEPSEGSAPGSTSESPSGTAPGSTSESPSGTAPGTSTPESGSASPGSPAGSPTSTEEGTSESATPESGPGTSTEPSEGSAPGSPAGSPTSTEEGTSESATPESGPGSEPATSGSETPGSSTPSGATGSPGASPGTSSTGSPGSSTPSGATGSPGSTSESPSGTAPGTSPSGESSTAPGSTSSTAESPGPGSSTPSGATGSPGASPGTSSTGSPGTPGSGTASSSPGSPAGSPTSTEEGSPAGSPTSTEEGTSTEPSEGSAP

SEQ ID NO: 1430 - protein, 950 aa, Artificial Sequence
  Description of Artificial Sequence: Synthetic polypeptide
MAEPAGSPTSTEEGTPGSGTASSSPGSSTPSGATGSPGASPGTSSTGSPGSPAGSPTSTEEGTSESATPESGPGTSTEPSEGSAPGSPAGSPTSTEEGTSTEPSEGSAPGTSTEPSEGSAPGTSESATPESGPGSEPATSGSETPGSEPATSGSETPGSPAGSPTSTEEGTSESATPESGPGTSTEPSEGSAPGTSTEPSEGSAPGSPAGSPTSTEEGTSTEPSEGSAPGTSTEPSEGSAPGTSESATPESGPGTSTEPSEGSAPGTSESATPESGPGSEPATSGSETPGTSTEPSEGSAPGTSTEPSEGSAPGTSESATPESGPGTSESATPESGPGSPAGSPTSTEEGTSESATPESGPGSEPATSGSETPGTSESATPESGPGTSTEPSEGSAPGTSTEPSEGSAPGTSTEPSEGSAPGTSTEPSEGSAPGTSTEPSEGSAPGTSTEPSEGSAPGSPAGSPTSTEEGTSTEPSEGSAPGTSESATPESGPGSEPATSGSETPGTSESATPESGPGSEPATSGSETPGTSESATPESGPGTSTEPSEGSAPGTSESATPESGPGSPAGSPTSTEEGSPAGSPTSTEEGSPAGSPTSTEEGTSESATPESGPGTSTEPSEGSAPGTSESATPESGPGSEPATSGSETPGTSESATPESGPGSEPATSGSETPGTSESATPESGPGTSTEPSEGSAPGSPAGSPTSTEEGTSESATPESGPGSEPATSGSETPGTSESATPESGPGSPAGSPTSTEEGSPAGSPTSTEEGTSTEPSEGSAPGTSESATPESGPGTSESATPESGPGTSESATPESGPGSEPATSGSETPGSEPATSGSETPGSPAGSPTSTEEGTSTEPSEGSAPGTSTEPSEGSAPGSEPATSGSETPGTSESATPESGPGTSTEPSEGSAPGYPIKPEAPGEDASPEELNRYYASLRHYLNLVTRQRY

SEQ ID NO: 1431 - protein, 961 aa, Artificial Sequence
  Description of Artificial Sequence: Synthetic polypeptide
MAEPAGSPTSTEEGASPGTSSTGSPGSSTPSGATGSPGSSTPSGATGSPGTSTEPSEGSAPGSEPATSGSETPGSPAGSPTSTEEGSTSSTAESPGPGTSTPESGSASPGSTSESPSGTAPGSTSESPSGTAPGTSTPESGSASPGTSTPESGSASPGSEPATSGSETPGTSESATPESGPGSPAGSPTSTEEGTSTEPSEGSAPGTSESATPESGPGTSTEPSEGSAPGTSTEPSEGSAPGSPAGSPTSTEEGTSTEPSEGSAPGTSTEPSEGSAPGTSESATPESGPGTSESATPESGPGTSTEPSEGSAPGTSTEPSEGSAPGTSESATPESGPGTSTEPSEGSAPGSEPATSGSETPGSPAGSPTSTEEGSSTPSGATGSPGTPGSGTASSSPGSSTPSGATGSPGTSTEPSEGSAPGTSTEPSEGSAPGSEPATSGSETPGSPAGSPTSTEEGSPAGSPTSTEEGTSTEPSEGSAPGASASGAPSTGGTSESATPESGPGSPAGSPTSTEEGSPAGSPTSTEEGSTSSTAESPGPGSTSESPSGTAPGTSPSGESSTAPGTPGSGTASSSPGSSTPSGATGSPGSSPSASTGTGPGSEPATSGSETPGTSESATPESGPGSEPATSGSETPGSTSSTAESPGPGSTSSTAESPGPGTSPSGESSTAPGSEPATSGSETPGSEPATSGSETPGTSTEPSEGSAPGSTSSTAESPGPGTSTPESGSASPGSTSESPSGTAPGTSTEPSEGSAPGTSTEPSEGSAPGTSTEPSEGSAPGSSTPSGATGSPGSSPSASTGTGPGASPGTSSTGSPGSEPATSGSETPGTSESATPESGPGSPAGSPTSTEEGSSTPSGATGSPGSSPSASTGTGPGASPGTSSTGSPGTSESATPESGPGTSTEPSEGSAPGTSTEPSEGSAPGYPIKPEAPGEDASPEELNRYYASLRHYLNLVTRQRY

SEQ ID NO: 1432 - protein, 181 aa, Artificial Sequence
  Description of Artificial Sequence: Synthetic polypeptide
GSEPATSGSETPGTSESATPESGPGSEPATSGSETPGSPAGSPTSTEEGTSTEPSEGSAPGSEPATSGSETPGSEPATSGSETPGSEPATSGSETPGTSTEPSEGSAPGTSESATPESGPGSEPATSGSETPGTSTEPSEGSAPGYPIKPEAPGEDASPEELNRYYASLRHYLNLVTRQRY

SEQ ID NO: 1433 - protein, 181 aa, Artificial Sequence
  Description of Artificial Sequence: Synthetic polypeptide
GTSTPESGSASPGTSPSGESSTAPGTSPSGESSTAPGSTSSTAESPGPGSTSESPSGTAPGSTSSTAESPGPGTSPSGESSTAPGTSTPESGSASPGSTSSTAESPGPGTSPSGESSTAPGTSPSGESSTAPGTSPSGESSTAPGYPIKPEAPGEDASPEELNRYYASLRHYLNLVTRQRY

SEQ ID NO: 1434 - protein, 325 aa, Artificial Sequence
  Description of Artificial Sequence: Synthetic polypeptide
GTSESATPESGPGSEPATSGSETPGTSESATPESGPGSEPATSGSETPGTSESATPESGPGTSTEPSEGSAPGSPAGSPTSTEEGTSESATPESGPGSEPATSGSETPGTSESATPESGPGSPAGSPTSTEEGSPAGSPTSTEEGTSTEPSEGSAPGTSESATPESGPGTSESATPESGPGTSESATPESGPGSEPATSGSETPGSEPATSGSETPGSPAGSPTSTEEGTSTEPSEGSAPGTSTEPSEGSAPGSEPATSGSETPGTSESATPESGPGTSTEPSEGSAPGYPIKPEAPGEDASPEELNRYYASLRHYLNLVTRQRY

SEQ ID NO: 1435 - protein, 613 aa, Artificial Sequence
  Description of Artificial Sequence: Synthetic polypeptide
GSPAGSPTSTEEGTSESATPESGPGTSTEPSEGSAPGSPAGSPTSTEEGTSTEPSEGSAPGTSTEPSEGSAPGTSESATPESGPGSEPATSGSETPGSEPATSGSETPGSPAGSPTSTEEGTSESATPESGPGTSTEPSEGSAPGTSTEPSEGSAPGSPAGSPTSTEEGTSTEPSEGSAPGTSTEPSEGSAPGTSESATPESGPGTSTEPSEGSAPGTSESATPESGPGSEPATSGSETPGTSTEPSEGSAPGTSTEPSEGSAPGTSESATPESGPGTSESATPESGPGSPAGSPTSTEEGTSESATPESGPGSEPATSGSETPGTSESATPESGPGTSTEPSEGSAPGTSTEPSEGSAPGTSTEPSEGSAPGTSTEPSEGSAPGTSTEPSEGSAPGTSTEPSEGSAPGSPAGSPTSTEEGTSTEPSEGSAPGTSESATPESGPGSEPATSGSETPGTSESATPESGPGSEPATSGSETPGTSESATPESGPGTSTEPSEGSAPGTSESATPESGPGSPAGSPTSTEEGSPAGSPTSTEEGSPAGSPTSTEEGTSESATPESGPGTSTEPSEGSAPGYPIKPEAPGEDASPEELNRYYASLRHYLNLVTRQRY

SEQ ID NO: 1436 - protein, 613 aa, Artificial Sequence
  Description of Artificial Sequence: Synthetic polypeptide
GSTSSTAESPGPGSTSSTAESPGPGSTSESPSGTAPGSTSSTAESPGPGSTSSTAESPGPGTSTPESGSASPGSTSESPSGTAPGTSPSGESSTAPGSTSESPSGTAPGSTSESPSGTAPGTSPSGESSTAPGSTSESPSGTAPGSTSESPSGTAPGTSPSGESSTAPGSTSESPSGTAPGSTSESPSGTAPGSTSESPSGTAPGTSTPESGSASPGSTSESPSGTAPGTSTPESGSASPGSTSSTAESPGPGSTSSTAESPGPGTSTPESGSASPGTSTPESGSASPGSTSESPSGTAPGTSTPESGSASPGTSTPESGSASPGSTSESPSGTAPGSTSESPSGTAPGSTSESPSGTAPGSTSSTAESPGPGTSTPESGSASPGTSTPESGSASPGSTSESPSGTAPGSTSESPSGTAPGTSTPESGSASPGSTSESPSGTAPGSTSESPSGTAPGTSTPESGSASPGTSPSGESSTAPGSTSSTAESPGPGTSPSGESSTAPGSTSSTAESPGPGTSTPESGSASPGSTSESPSGTAPGSTSSTAESPGPGTSTPESGSASPGTSTPESGSASPGYPIKPEAPGEDASPEELNRYYASLRHYLNLVTRQRY

SEQ ID NO: 1437 - protein, 873 aa, Artificial Sequence
  Description of Artificial Sequence: Synthetic polypeptide
GSSESGSSEGGPGSSESGSSEGGPGESPGGSSGSESGSGGEPSESGSSGESPGGSSGSESGESPGGSSGSESGSSESGSSEGGPGSSESGSSEGGPGSSESGSSEGGPGESPGGSSGSESGESPGGSSGSESGESPGGSSGSESGSSESGSSEGGPGSSESGSSEGGPGSSESGSSEGGPGSSESGSSEGGPGSSESGSSEGGPGSSESGSSEGGPGSGGEPSESGSSGESPGGSSGSESGESPGGSSGSESGSGGEPSESGSSGSEGSSGPGESSGSSESGSSEGGPGSGGEPSESGSSGSEGSSGPGESSGSSESGSSEGGPGSGGEPSESGSSGESPGGSSGSESGSGGEPSESGSSGSGGEPSESGSSGSSESGSSEGGPGSGGEPSESGSSGSGGEPSESGSSGSEGSSGPGESSGESPGGSSGSESGSEGSSGPGESSGSEGSSGPGESSGSGGEPSESGSSGSSESGSSEGGPGSSESGSSEGGPGESPGGSSGSESGSGGEPSESGSSGSEGSSGPGESSGESPGGSSGSESGSEGSSGPGSSESGSSEGGPGSGGEPSESGSSGSEGSSGPGESSGSEGSSGPGESSGSEGSSGPGESSGSGGEPSESGSSGSGGEPSESGSSGESPGGSSGSESGESPGGSSGSESGSGGEPSESGSSGSEGSSGPGESSGESPGGSSGSESGSSESGSSEGGPGSSESGSSEGGPGSSESGSSEGGPGSGGEPSESGSSGSSESGSSEGGPGESPGGSSGSESGSGGEPSESGSSGSSESGSSEGGPGESPGGSSGSESGSGGEPSESGSSGESPGGSSGSESGSGGEPSESGSSGYPIKPEAPGEDASPEELNRYYASLRHYLNLVTRQRY

SEQ ID NO: 1438 - protein, 901 aa, Artificial Sequence
  Description of Artificial Sequence: Synthetic polypeptide
GSPAGSPTSTEEGTSESATPESGPGTSTEPSEGSAPGSPAGSPTSTEEGTSTEPSEGSAPGTSTEPSEGSAPGTSESATPESGPGSEPATSGSETPGSEPATSGSETPGSPAGSPTSTEEGTSESATPESGPGTSTEPSEGSAPGTSTEPSEGSAPGSPAGSPTSTEEGTSTEPSEGSAPGTSTEPSEGSAPGTSESATPESGPGTSTEPSEGSAPGTSESATPESGPGSEPATSGSETPGTSTEPSEGSAPGTSTEPSEGSAPGTSESATPESGPGTSESATPESGPGSPAGSPTSTEEGTSESATPESGPGSEPATSGSETPGTSESATPESGPGTSTEPSEGSAPGTSTEPSEGSAPGTSTEPSEGSAPGTSTEPSEGSAPGTSTEPSEGSAPGTSTEPSEGSAPGSPAGSPTSTEEGTSTEPSEGSAPGTSESATPESGPGSEPATSGSETPGTSESATPESGPGSEPATSGSETPGTSESATPESGPGTSTEPSEGSAPGTSESATPESGPGSPAGSPTSTEEGSPAGSPTSTEEGSPAGSPTSTEEGTSESATPESGPGTSTEPSEGSAPGTSESATPESGPGSEPATSGSETPGTSESATPESGPGSEPATSGSETPGTSESATPESGPGTSTEPSEGSAPGSPAGSPTSTEEGTSESATPESGPGSEPATSGSETPGTSESATPESGPGSPAGSPTSTEEGSPAGSPTSTEEGTSTEPSEGSAPGTSESATPESGPGTSESATPESGPGTSESATPESGPGSEPATSGSETPGSEPATSGSETPGSPAGSPTSTEEGTSTEPSEGSAPGTSTEPSEGSAPGSEPATSGSETPGTSESATPESGPGTSTEPSEGSAPGYPIKPEAPGEDASPEELNRYYASLRHYLNLVTRQRY

SEQ ID NO: 1439 - protein, 912 aa, Artificial Sequence
  Description of Artificial Sequence: Synthetic polypeptide
  MOD_RES (430)..(432): Any amino acid
  MOD_RES (443)..(446): Any amino acid
GSTSESPSGTAPGTSPSGESSTAPGSTSESPSGTAPGSTSESPSGTAPGTSTPESGSASPGTSTPESGSASPGSTSESPSGTAPGSTSESPSGTAPGTSPSGESSTAPGSTSESPSGTAPGTSPSGESSTAPGTSPSGESSTAPGSTSSTAESPGPGTSPSGESSTAPGTSPSGESSTAPGSTSSTAESPGPGTSTPESGSASPGTSTPESGSASPGSTSESPSGTAPGSTSESPSGTAPGTSTPESGSASPGSTSSTAESPGPGTSTPESGSASPGSTSESPSGTAPGTSPSGESSTAPGSTSSTAESPGPGTSPSGESSTAPGTSTPESGSASPGSTSSTAESPGPGSTSSTAESPGPGSTSSTAESPGPGSTSSTAESPGPGTSPSGESSTAPGSTSESPSGTAPGSTSESPSGTAPGTSTPESGPXXXGASASGAPSTXXXXSESPSGTAPGSTSESPSGTAPGSTSESPSGTAPGSTSESPSGTAPGSTSESPSGTAPGSTSESPSGTAPGTSTPESGSASPGTSPSGESSTAPGTSPSGESSTAPGSTSSTAESPGPGTSPSGESSTAPGTSTPESGSASPGSTSESPSGTAPGSTSESPSGTAPGTSPSGESSTAPGSTSESPSGTAPGTSTPESGSASPGTSTPESGSASPGSTSESPSGTAPGTSTPESGSASPGSTSSTAESPGPGSTSESPSGTAPGSTSESPSGTAPGTSPSGESSTAPGSTSSTAESPGPGTSPSGESSTAPGTSTPESGSASPGTSPSGESSTAPGTSPSGESSTAPGTSPSGESSTAPGSTSSTAESPGPGSTSSTAESPGPGTSPSGESSTAPGSSPSASTGTGPGSSTPSGATGSPGSSTPSGATGSPGYPIKPEAPGEDASPEELNRYYASLRHYLNLVTRQRY

SEQ ID NO: 1440 - protein, 901 aa, Artificial Sequence
  Description of Artificial Sequence: Synthetic polypeptide
GASPGTSSTGSPGSSPSASTGTGPGSSPSASTGTGPGTPGSGTASSSPGSSTPSGATGSPGSNPSASTGTGPGASPGTSSTGSPGTPGSGTASSSPGSSTPSGATGSPGTPGSGTASSSPGASPGTSSTGSPGASPGTSSTGSPGTPGSGTASSSPGSSTPSGATGSPGASPGTSSTGSPGTPGSGTASSSPGSSTPSGATGSPGSNPSASTGTGPGSSPSASTGTGPGSSTPSGATGSPGSSTPSGATGSPGASPGTSSTGSPGASPGTSSTGSPGASPGTSSTGSPGTPGSGTASSSPGASPGTSSTGSPGASPGTSSTGSPGASPGTSSTGSPGSSPSASTGTGPGTPGSGTASSSPGASPGTSSTGSPGASPGTSSTGSPGASPGTSSTGSPGSSTPSGATGSPGSSTPSGATGSPGASPGTSSTGSPGTPGSGTASSSPGSSTPSGATGSPGSSTPSGATGSPGSSTPSGATGSPGSSPSASTGTGPGASPGTSSTGSPGASPGTSSTGSPGTPGSGTASSSPGASPGTSSTGSPGASPGTSSTGSPGASPGTSSTGSPGASPGTSSTGSPGTPGSGTASSSPGSSTPSGATGSPGTPGSGTASSSPGSSTPSGATGSPGTPGSGTASSSPGSSTPSGATGSPGSSTPSGATGSPGSSPSASTGTGPGSSPSASTGTGPGASPGTSSTGSPGTPGSGTASSSPGSSTPSGATGSPGSSPSASTGTGPGSSPSASTGTGPGASPGTSSTGSPGASPGTSSTGSPGSSTPSGATGSPGSSPSASTGTGPGASPGTSSTGSPGSSPSASTGTGPGTPGSGTASSSPGSSTPSGATGSPGSSTPSGATGSPGASPGTSSTGSPGYPIKPEAPGEDASPEELNRYYASLRHYLNLVTRQRY

SEQ ID NO: 1441 - protein, 912 aa, Artificial Sequence
  Description of Artificial Sequence: Synthetic polypeptide
GTSTEPSEGSAPGSEPATSGSETPGSPAGSPTSTEEGSTSSTAESPGPGTSTPESGSASPGSTSESPSGTAPGSTSESPSGTAPGTSTPESGSASPGTSTPESGSASPGSEPATSGSETPGTSESATPESGPGSPAGSPTSTEEGTSTEPSEGSAPGTSESATPESGPGTSTEPSEGSAPGTSTEPSEGSAPGSPAGSPTSTEEGTSTEPSEGSAPGTSTEPSEGSAPGTSESATPESGPGTSESATPESGPGTSTEPSEGSAPGTSTEPSEGSAPGTSESATPESGPGTSTEPSEGSAPGSEPATSGSETPGSPAGSPTSTEEGSSTPSGATGSPGTPGSGTASSSPGSSTPSGATGSPGTSTEPSEGSAPGTSTEPSEGSAPGSEPATSGSETPGSPAGSPTSTEEGSPAGSPTSTEEGTSTEPSEGSAPGASASGAPSTGGTSESATPESGPGSPAGSPTSTEEGSPAGSPTSTEEGSTSSTAESPGPGSTSESPSGTAPGTSPSGESSTAPGTPGSGTASSSPGSSTPSGATGSPGSSPSASTGTGPGSEPATSGSETPGTSESATPESGPGSEPATSGSETPGSTSSTAESPGPGSTSSTAESPGPGTSPSGESSTAPGSEPATSGSETPGSEPATSGSETPGTSTEPSEGSAPGSTSSTAESPGPGTSTPESGSASPGSTSESPSGTAPGTSTEPSEGSAPGTSTEPSEGSAPGTSTEPSEGSAPGSSTPSGATGSPGSSPSASTGTGPGASPGTSSTGSPGSEPATSGSETPGTSESATPESGPGSPAGSPTSTEEGSSTPSGATGSPGSSPSASTGTGPGASPGTSSTGSPGTSESATPESGPGTSTEPSEGSAPGTSTEPSEGSAPGYPIKPEAPGEDASPEELNRYYASLRHYLNLVTRQRY

SEQ ID NO: 1442 - protein, 177 aa, Artificial Sequence
  Description of Artificial Sequence: Synthetic polypeptide
TAPRSLRRSSCFGGRMDRIGAQSGLGCNSFRYGGSEPATSGSETPGTSESATPESGPGSEPATSGSETPGSPAGSPTSTEEGTSTEPSEGSAPGSEPATSGSETPGSEPATSGSETPGSEPATSGSETPGTSTEPSEGSAPGTSESATPESGPGSEPATSGSETPGTSTEPSEGSAP

SEQ ID NO: 1443 - protein, 177 aa, Artificial Sequence
  Description of Artificial Sequence: Synthetic polypeptide
TAPRSLRRSSCFGGRMDRIGAQSGLGCNSFRYGGTSTPESGSASPGTSPSGESSTAPGTSPSGESSTAPGSTSSTAESPGPGSTSESPSGTAPGSTSSTAESPGPGTSPSGESSTAPGTSTPESGSASPGSTSSTAESPGPGTSPSGESSTAPGTSPSGESSTAPGTSPSGESSTAP

SEQ ID NO: 1444 - protein, 321 aa, Artificial Sequence
  Description of Artificial Sequence: Synthetic polypeptide
TAPRSLRRSSCFGGRMDRIGAQSGLGCNSFRYGGTSESATPESGPGSEPATSGSETPGTSESATPESGPGSEPATSGSETPGTSESATPESGPGTSTEPSEGSAPGSPAGSPTSTEEGTSESATPESGPGSEPATSGSETPGTSESATPESGPGSPAGSPTSTEEGSPAGSPTSTEEGTSTEPSEGSAPGTSESATPESGPGTSESATPESGPGTSESATPESGPGSEPATSGSETPGSEPATSGSETPGSPAGSPTSTEEGTSTEPSEGSAPGTSTEPSEGSAPGSEPATSGSETPGTSESATPESGPGTSTEPSEGSAP

SEQ ID NO: 1445 - protein, 609 aa, Artificial Sequence
  Description of Artificial Sequence: Synthetic polypeptide
TAPRSLRRSSCFGGRMDRIGAQSGLGCNSFRYGGSPAGSPTSTEEGTSESATPESGPGTSTEPSEGSAPGSPAGSPTSTEEGTSTEPSEGSAPGTSTEPSEGSAPGTSESATPESGPGSEPATSGSETPGSEPATSGSETPGSPAGSPTSTEEGTSESATPESGPGTSTEPSEGSAPGTSTEPSEGSAPGSPAGSPTSTEEGTSTEPSEGSAPGTSTEPSEGSAPGTSESATPESGPGTSTEPSEGSAPGTSESATPESGPGSEPATSGSETPGTSTEPSEGSAPGTSTEPSEGSAPGTSESATPESGPGTSESATPESGPGSPAGSPTSTEEGTSESATPESGPGSEPATSGSETPGTSESATPESGPGTSTEPSEGSAPGTSTEPSEGSAPGTSTEPSEGSAPGTSTEPSEGSAPGTSTEPSEGSAPGTSTEPSEGSAPGSPAGSPTSTEEGTSTEPSEGSAPGTSESATPESGPGSEPATSGSETPGTSESATPESGPGSEPATSGSETPGTSESATPESGPGTSTEPSEGSAPGTSESATPESGPGSPAGSPTSTEEGSPAGSPTSTEEGSPAGSPTSTEEGTSESATPESGPGTSTEPSEGSAP

SEQ ID NO: 1446 - protein, 609 aa, Artificial Sequence
  Description of Artificial Sequence: Synthetic polypeptide
TAPRSLRRSSCFGGRMDRIGAQSGLGCNSFRYGGSTSSTAESPGPGSTSSTAESPGPGSTSESPSGTAPGSTSSTAESPGPGSTSSTAESPGPGTSTPESGSASPGSTSESPSGTAPGTSPSGESSTAPGSTSESPSGTAPGSTSESPSGTAPGTSPSGESSTAPGSTSESPSGTAPGSTSESPSGTAPGTSPSGESSTAPGSTSESPSGTAPGSTSESPSGTAPGSTSESPSGTAPGTSTPESGSASPGSTSESPSGTAPGTSTPESGSASPGSTSSTAESPGPGSTSSTAESPGPGTSTPESGSASPGTSTPESGSASPGSTSESPSGTAPGTSTPESGSASPGTSTPESGSASPGSTSESPSGTAPGSTSESPSGTAPGSTSESPSGTAPGSTSSTAESPGPGTSTPESGSASPGTSTPESGSASPGSTSESPSGTAPGSTSESPSGTAPGTSTPESGSASPGSTSESPSGTAPGSTSESPSGTAPGTSTPESGSASPGTSPSGESSTAPGSTSSTAESPGPGTSPSGESSTAPGSTSSTAESPGPGTSTPESGSASPGSTSESPSGTAPGSTSSTAESPGPGTSTPESGSASPGTSTPESGSASP

SEQ ID NO: 1447 - protein, 869 aa, Artificial Sequence
  Description of Artificial Sequence: Synthetic polypeptide
TAPRSLRRSSCFGGRMDRIGAQSGLGCNSFRYGGSSESGSSEGGPGSSESGSSEGGPGESPGGSSGSESGSGGEPSESGSSGESPGGSSGSESGESPGGSSGSESGSSESGSSEGGPGSSESGSSEGGPGSSESGSSEGGPGESPGGSSGSESGESPGGSSGSESGESPGGSSGSESGSSESGSSEGGPGSSESGSSEGGPGSSESGSSEGGPGSSESGSSEGGPGSSESGSSEGGPGSSESGSSEGGPGSGGEPSESGSSGESPGGSSGSESGESPGGSSGSESGSGGEPSESGSSGSEGSSGPGESSGSSESGSSEGGPGSGGEPSESGSSGSEGSSGPGESSGSSESGSSEGGPGSGGEPSESGSSGESPGGSSGSESGSGGEPSESGSSGSGGEPSESGSSGSSESGSSEGGPGSGGEPSESGSSGSGGEPSESGSSGSEGSSGPGESSGESPGGSSGSESGSEGSSGPGESSGSEGSSGPGESSGSGGEPSESGSSGSSESGSSEGGPGSSESGSSEGGPGESPGGSSGSESGSGGEPSESGSSGSEGSSGPGESSGESPGGSSGSESGSEGSSGPGSSESGSSEGGPGSGGEPSESGSSGSEGSSGPGESSGSEGSSGPGESSGSEGSSGPGESSGSGGEPSESGSSGSGGEPSESGSSGESPGGSSGSESGESPGGSSGSESGSGGEPSESGSSGSEGSSGPGESSGESPGGSSGSESGSSESGSSEGGPGSSESGSSEGGPGSSESGSSEGGPGSGGEPSESGSSGSSESGSSEGGPGESPGGSSGSESGSGGEPSESGSSGSSESGSSEGGPGESPGGSSGSESGSGGEPSESGSSGESPGGSSGSESGSGGEPSESGSS

SEQ ID NO: 1448 - protein, 897 aa, Artificial Sequence
  Description of Artificial Sequence: Synthetic polypeptide
TAPRSLRRSSCFGGRMDRIGAQSGLGCNSFRYGGSPAGSPTSTEEGTSESATPESGPGTSTEPSEGSAPGSPAGSPTSTEEGTSTEPSEGSAPGTSTEPSEGSAPGTSESATPESGPGSEPATSGSETPGSEPATSGSETPGSPAGSPTSTEEGTSESATPESGPGTSTEPSEGSAPGTSTEPSEGSAPGSPAGSPTSTEEGTSTEPSEGSAPGTSTEPSEGSAPGTSESATPESGPGTSTEPSEGSAPGTSESATPESGPGSEPATSGSETPGTSTEPSEGSAPGTSTEPSEGSAPGTSESATPESGPGTSESATPESGPGSPAGSPTSTEEGTSESATPESGPGSEPATSGSETPGTSESATPESGPGTSTEPSEGSAPGTSTEPSEGSAPGTSTEPSEGSAPGTSTEPSEGSAPGTSTEPSEGSAPGTSTEPSEGSAPGSPAGSPTSTEEGTSTEPSEGSAPGTSESATPESGPGSEPATSGSETPGTSESATPESGPGSEPATSGSETPGTSESATPESGPGTSTEPSEGSAPGTSESATPESGPGSPAGSPTSTEEGSPAGSPTSTEEGSPAGSPTSTEEGTSESATPESGPGTSTEPSEGSAPGTSESATPESGPGSEPATSGSETPGTSESATPESGPGSEPATSGSETPGTSESATPESGPGTSTEPSEGSAPGSPAGSPTSTEEGTSESATPESGPGSEPATSGSETPGTSESATPESGPGSPAGSPTSTEEGSPAGSPTSTEEGTSTEPSEGSAPGTSESATPESGPGTSESATPESGPGTSESATPESGPGSEPATSGSETPGSEPATSGSETPGSPAGSPTSTEEGTSTEPSEGSAPGTSTEPSEGSAPGSEPATSGSETPGTSESATPESGPGTSTEPSEGSAP

SEQ ID NO: 1449 - protein, 908 aa, Artificial Sequence
  Description of Artificial Sequence: Synthetic polypeptide
  MOD_RES (463)..(465): Any amino acid
  MOD_RES (476)..(479): Any amino acid
TAPRSLRRSSCFGGRMDRIGAQSGLGCNSFRYGGSTSESPSGTAPGTSPSGESSTAPGSTSESPSGTAPGSTSESPSGTAPGTSTPESGSASPGTSTPESGSASPGSTSESPSGTAPGSTSESPSGTAPGTSPSGESSTAPGSTSESPSGTAPGTSPSGESSTAPGTSPSGESSTAPGSTSSTAESPGPGTSPSGESSTAPGTSPSGESSTAPGSTSSTAESPGPGTSTPESGSASPGTSTPESGSASPGSTSESPSGTAPGSTSESPSGTAPGTSTPESGSASPGSTSSTAESPGPGTSTPESGSASPGSTSESPSGTAPGTSPSGESSTAPGSTSSTAESPGPGTSPSGESSTAPGTSTPESGSASPGSTSSTAESPGPGSTSSTAESPGPGSTSSTAESPGPGSTSSTAESPGPGTSPSGESSTAPGSTSESPSGTAPGSTSESPSGTAPGTSTPESGPXXXGASASGAPSTXXXXSESPSGTAPGSTSESPSGTAPGSTSESPSGTAPGSTSESPSGTAPGSTSESPSGTAPGSTSESPSGTAPGTSTPESGSASPGTSPSGESSTAPGTSPSGESSTAPGSTSSTAESPGPGTSPSGESSTAPGTSTPESGSASPGSTSESPSGTAPGSTSESPSGTAPGTSPSGESSTAPGSTSESPSGTAPGTSTPESGSASPGTSTPESGSASPGSTSESPSGTAPGTSTPESGSASPGSTSSTAESPGPGSTSESPSGTAPGSTSESPSGTAPGTSPSGESSTAPGSTSSTAESPGPGTSPSGESSTAPGTSTPESGSASPGTSPSGESSTAPGTSPSGESSTAPGTSPSGESSTAPGSTSSTAESPGPGSTSSTAESPGPGTSPSGESSTAPGSSPSASTGTGPGSSTPSGATGSPGSSTPSGATGSP

SEQ ID NO: 1450 - protein, 897 aa, Artificial Sequence
  Description of Artificial Sequence: Synthetic polypeptide
TAPRSLRRSSCFGGRMDRIGAQSGLGCNSFRYGGASPGTSSTGSPGSSPSASTGTGPGSSPSASTGTGPGTPGSGTASSSPGSSTPSGATGSPGSNPSASTGTGPGASPGTSSTGSPGTPGSGTASSSPGSSTPSGATGSPGTPGSGTASSSPGASPGTSSTGSPGASPGTSSTGSPGTPGSGTASSSPGSSTPSGATGSPGASPGTSSTGSPGTPGSGTASSSPGSSTPSGATGSPGSNPSASTGTGPGSSPSASTGTGPGSSTPSGATGSPGSSTPSGATGSPGASPGTSSTGSPGASPGTSSTGSPGASPGTSSTGSPGTPGSGTASSSPGASPGTSSTGSPGASPGTSSTGSPGASPGTSSTGSPGSSPSASTGTGPGTPGSGTASSSPGASPGTSSTGSPGASPGTSSTGSPGASPGTSSTGSPGSSTPSGATGSPGSSTPSGATGSPGASPGTSSTGSPGTPGSGTASSSPGSSTPSGATGSPGSSTPSGATGSPGSSTPSGATGSPGSSPSASTGTGPGASPGTSSTGSPGASPGTSSTGSPGTPGSGTASSSPGASPGTSSTGSPGASPGTSSTGSPGASPGTSSTGSPGASPGTSSTGSPGTPGSGTASSSPGSSTPSGATGSPGTPGSGTASSSPGSSTPSGATGSPGTPGSGTASSSPGSSTPSGATGSPGSSTPSGATGSPGSSPSASTGTGPGSSPSASTGTGPGASPGTSSTGSPGTPGSGTASSSPGSSTPSGATGSPGSSPSASTGTGPGSSPSASTGTGPGASPGTSSTGSPGASPGTSSTGSPGSSTPSGATGSPGSSPSASTGTGPGASPGTSSTGSPGSSPSASTGTGPGTPGSGTASSSPGSSTPSGATGSPGSSTPSGATGSPGASPGTSSTGSP

SEQ ID NO: 1451 - protein, 908 aa, Artificial Sequence
  Description of Artificial Sequence: Synthetic polypeptide
TAPRSLRRSSCFGGRMDRIGAQSGLGCNSFRYGGTSTEPSEGSAPGSEPATSGSETPGSPAGSPTSTEEGSTSSTAESPGPGTSTPESGSASPGSTSESPSGTAPGSTSESPSGTAPGTSTPESGSASPGTSTPESGSASPGSEPATSGSETPGTSESATPESGPGSPAGSPTSTEEGTSTEPSEGSAPGTSESATPESGPGTSTEPSEGSAPGTSTEPSEGSAPGSPAGSPTSTEEGTSTEPSEGSAPGTSTEPSEGSAPGTSESATPESGPGTSESATPESGPGTSTEPSEGSAPGTSTEPSEGSAPGTSESATPESGPGTSTEPSEGSAPGSEPATSGSETPGSPAGSPTSTEEGSSTPSGATGSPGTPGSGTASSSPGSSTPSGATGSPGTSTEPSEGSAPGTSTEPSEGSAPGSEPATSGSETPGSPAGSPTSTEEGSPAGSPTSTEEGTSTEPSEGSAPGASASGAPSTGGTSESATPESGPGSPAGSPTSTEEGSPAGSPTSTEEGSTSSTAESPGPGSTSESPSGTAPGTSPSGESSTAPGTPGSGTASSSPGSSTPSGATGSPGSSPSASTGTGPGSEPATSGSETPGTSESATPESGPGSEPATSGSETPGSTSSTAESPGPGSTSSTAESPGPGTSPSGESSTAPGSEPATSGSETPGSEPATSGSETPGTSTEPSEGSAPGSTSSTAESPGPGTSTPESGSASPGSTSESPSGTAPGTSTEPSEGSAPGTSTEPSEGSAPGTSTEPSEGSAPGSSTPSGATGSPGSSPSASTGTGPGASPGTSSTGSPGSEPATSGSETPGTSESATPESGPGSPAGSPTSTEEGSSTPSGATGSPGSSPSASTGTGPGASPGTSSTGSPGTSESATPESGPGTSTEPSEGSAPGTSTEPSEGSAP

SEQ ID NO: 1452 - protein, 1351 aa, Artificial Sequence
  Description of Artificial Sequence: Synthetic polypeptide
TAPRSLRRSSCFGGRMDRIGAQSGLGCNSFRYGGTSTEPSEGSAPGSEPATSGSETPGSPAGSPTSTEEGSTSSTAESPGPGTSTPESGSASPGSTSESPSGTAPGSTSESPSGTAPGTSTPESGSASPGTSTPESGSASPGSEPATSGSETPGTSESATPESGPGSPAGSPTSTEEGTSTEPSEGSAPGTSESATPESGPGTSTEPSEGSAPGTSTEPSEGSAPGSPAGSPTSTEEGTSTEPSEGSAPGTSTEPSEGSAPGTSESATPESGPGTSESATPESGPGTSTEPSEGSAPGTSTEPSEGSAPGTSESATPESGPGTSTEPSEGSAPGSEPATSGSETPGSPAGSPTSTEEGSSTPSGATGSPGTPGSGTASSSPGSSTPSGATGSPGTSTEPSEGSAPGTSTEPSEGSAPGSEPATSGSETPGSPAGSPTSTEEGSPAGSPTSTEEGTSTEPSEGSAPGPEPTGPAPSGGSEPATSGSETPGTSESATPESGPGSPAGSPTSTEEGTSESATPESGPGSPAGSPTSTEEGSPAGSPTSTEEGTSESATPESGPGSPAGSPTSTEEGSPAGSPTSTEEGSTSSTAESPGPGSTSESPSGTAPGTSPSGESSTAPGSTSESPSGTAPGSTSESPSGTAPGTSPSGESSTAPGTSTEPSEGSAPGTSESATPESGPGTSESATPESGPGSEPATSGSETPGTSESATPESGPGTSESATPESGPGTSTEPSEGSAPGTSESATPESGPGTSTEPSEGSAPGTSPSGESSTAPGTSPSGESSTAPGTSPSGESSTAPGTSTEPSEGSAPGSPAGSPTSTEEGTSTEPSEGSAPGSSPSASTGTGPGSSTPSGATGSPGSSTPSGATGSPGSSTPSGATGSPGSSTPSGATGSPGASPGTSSTGSPGASASGAPSTGGTSPSGESSTAPGSTSSTAESPGPGTSPSGESSTAPGTSESATPESGPGTSTEPSEGSAPGTSTEPSEGSAPGSSPSASTGTGPGSSTPSGATGSPGASPGTSSTGSPGTSTPESGSASPGTSPSGESSTAPGTSPSGESSTAPGTSESATPESGPGSEPATSGSETPGTSTEPSEGSAPGSTSESPSGTAPGSTSESPSGTAPGTSTPESGSASPGSPAGSPTSTEEGTSESATPESGPGTSTEPSEGSAPGSPAGSPTSTEEGTSESATPESGPGSEPATSGSETPGSSTPSGATGSPGASPGTSSTGSPGSSTPSGATGSPGSTSESPSGTAPGTSPSGESSTAPGSTSSTAESPGPGSSTPSGATGSPGASPGTSSTGSPGTPGSGTASSSPGSPAGSPTSTEEGSPAGSPTSTEEGTSTEPSEGSAP

SEQ ID NO: 1453 - protein, 946 aa, Artificial Sequence
  Description of Artificial Sequence: Synthetic polypeptide
MAEPAGSPTSTEEGTPGSGTASSSPGSSTPSGATGSPGASPGTSSTGSPGSPAGSPTSTEEGTSESATPESGPGTSTEPSEGSAPGSPAGSPTSTEEGTSTEPSEGSAPGTSTEPSEGSAPGTSESATPESGPGSEPATSGSETPGSEPATSGSETPGSPAGSPTSTEEGTSESATPESGPGTSTEPSEGSAPGTSTEPSEGSAPGSPAGSPTSTEEGTSTEPSEGSAPGTSTEPSEGSAPGTSESATPESGPGTSTEPSEGSAPGTSESATPESGPGSEPATSGSETPGTSTEPSEGSAPGTSTEPSEGSAPGTSESATPESGPGTSESATPESGPGSPAGSPTSTEEGTSESATPESGPGSEPATSGSETPGTSESATPESGPGTSTEPSEGSAPGTSTEPSEGSAPGTSTEPSEGSAPGTSTEPSEGSAPGTSTEPSEGSAPGTSTEPSEGSAPGSPAGSPTSTEEGTSTEPSEGSAPGTSESATPESGPGSEPATSGSETPGTSESATPESGPGSEPATSGSETPGTSESATPESGPGTSTEPSEGSAPGTSESATPESGPGSPAGSPTSTEEGSPAGSPTSTEEGSPAGSPTSTEEGTSESATPESGPGTSTEPSEGSAPGTSESATPESGPGSEPATSGSETPGTSESATPESGPGSEPATSGSETPGTSESATPESGPGTSTEPSEGSAPGSPAGSPTSTEEGTSESATPESGPGSEPATSGSETPGTSESATPESGPGSPAGSPTSTEEGSPAGSPTSTEEGTSTEPSEGSAPGTSESATPESGPGTSESATPESGPGTSESATPESGPGSEPATSGSETPGSEPATSGSETPGSPAGSPTSTEEGTSTEPSEGSAPGTSTEPSEGSAPGSEPATSGSETPGTSESATPESGPGTSTEPSEGSAPGTAPRSLRRSSCFGGRMDRIGAQSGLGCNSFRY

SEQ ID NO: 1454 - protein, 957 aa, Artificial Sequence
  Description of Artificial Sequence: Synthetic polypeptide
MAEPAGSPTSTEEGASPGTSSTGSPGSSTPSGATGSPGSSTPSGATGSPGTSTEPSEGSAPGSEPATSGSETPGSPAGSPTSTEEGSTSSTAESPGPGTSTPESGSASPGSTSESPSGTAPGSTSESPSGTAPGTSTPESGSASPGTSTPESGSASPGSEPATSGSETPGTSESATPESGPGSPAGSPTSTEEGTSTEPSEGSAPGTSESATPESGPGTSTEPSEGSAPGTSTEPSEGSAPGSPAGSPTSTEEGTSTEPSEGSAPGTSTEPSEGSAPGTSESATPESGPGTSESATPESGPGTSTEPSEGSAPGTSTEPSEGSAPGTSESATPESGPGTSTEPSEGSAPGSEPATSGSETPGSPAGSPTSTEEGSSTPSGATGSPGTPGSGTASSSPGSSTPSGATGSPGTSTEPSEGSAPGTSTEPSEGSAPGSEPATSGSETPGSPAGSPTSTEEGSPAGSPTSTEEGTSTEPSEGSAPGASASGAPSTGGTSESATPESGPGSPAGSPTSTEEGSPAGSPTSTEEGSTSSTAESPGPGSTSESPSGTAPGTSPSGESSTAPGTPGSGTASSSPGSSTPSGATGSPGSSPSASTGTGPGSEPATSGSETPGTSESATPESGPGSEPATSGSETPGSTSSTAESPGPGSTSSTAESPGPGTSPSGESSTAPGSEPATSGSETPGSEPATSGSETPGTSTEPSEGSAPGSTSSTAESPGPGTSTPESGSASPGSTSESPSGTAPGTSTEPSEGSAPGTSTEPSEGSAPGTSTEPSEGSAPGSSTPSGATGSPGSSPSASTGTGPGASPGTSSTGSPGSEPATSGSETPGTSESATPESGPGSPAGSPTSTEEGSSTPSGATGSPGSSPSASTGTGPGASPGTSSTGSPGTSESATPESGPGTSTEPSEGSAPGTSTEPSEGSAPGTAPRSLRRSSCFGGRMDRIGAQSGLGCNSFRY

SEQ ID NO: 1455 - protein, 177 aa, Artificial Sequence
  Description of Artificial Sequence: Synthetic polypeptide
GSEPATSGSETPGTSESATPESGPGSEPATSGSETPGSPAGSPTSTEEGTSTEPSEGSAPGSEPATSGSETPGSEPATSGSETPGSEPATSGSETPGTSTEPSEGSAPGTSESATPESGPGSEPATSGSETPGTSTEPSEGSAPGTAPRSLRRSSCFGGRMDRIGAQSGLGCNSFRY

SEQ ID NO: 1456 - protein, 177 aa, Artificial Sequence
  Description of Artificial Sequence: Synthetic polypeptide
GTSTPESGSASPGTSPSGESSTAPGTSPSGESSTAPGSTSSTAESPGPGSTSESPSGTAPGSTSSTAESPGPGTSPSGESSTAPGTSTPESGSASPGSTSSTAESPGPGTSPSGESSTAPGTSPSGESSTAPGTSPSGESSTAPGTAPRSLRRSSCFGGRMDRIGAQSGLGCNSFRY

SEQ ID NO: 1457 - protein, 321 aa, Artificial Sequence
  Description of Artificial Sequence: Synthetic polypeptide
GTSESATPESGPGSEPATSGSETPGTSESATPESGPGSEPATSGSETPGTSESATPESGPGTSTEPSEGSAPGSPAGSPTSTEEGTSESATPESGPGSEPATSGSETPGTSESATPESGPGSPAGSPTSTEEGSPAGSPTSTEEGTSTEPSEGSAPGTSESATPESGPGTSESATPESGPGTSESATPESGPGSEPATSGSETPGSEPATSGSETPGSPAGSPTSTEEGTSTEPSEGSAPGTSTEPSEGSAPGSEPATSGSETPGTSESATPESGPGTSTEPSEGSAPGTAPRSLRRSSCFGGRMDRIGAQSGLGCNSFRY

SEQ ID NO: 1458 - protein, 609 aa, Artificial Sequence
  Description of Artificial Sequence: Synthetic polypeptide
GSPAGSPTSTEEGTSESATPESGPGTSTEPSEGSAPGSPAGSPTSTEEGTSTEPSEGSAPGTSTEPSEGSAPGTSESATPESGPGSEPATSGSETPGSEPATSGSETPGSPAGSPTSTEEGTSESATPESGPGTSTEPSEGSAPGTSTEPSEGSAPGSPAGSPTSTEEGTSTEPSEGSAPGTSTEPSEGSAPGTSESATPESGPGTSTEPSEGSAPGTSESATPESGPGSEPATSGSETPGTSTEPSEGSAPGTSTEPSEGSAPGTSESATPESGPGTSESATPESGPGSPAGSPTSTEEGTSESATPESGPGSEPATSGSETPGTSESATPESGPGTSTEPSEGSAPGTSTEPSEGSAPGTSTEPSEGSAPGTSTEPSEGSAPGTSTEPSEGSAPGTSTEPSEGSAPGSPAGSPTSTEEGTSTEPSEGSAPGTSESATPESGPGSEPATSGSETPGTSESATPESGPGSEPATSGSETPGTSESATPESGPGTSTEPSEGSAPGTSESATPESGPGSPAGSPTSTEEGSPAGSPTSTEEGSPAGSPTSTEEGTSESATPESGPGTSTEPSEGSAPGTAPRSLRRSSCFGGRMDRIGAQSGLGCNSFRY

SEQ ID NO: 1459 - protein, 609 aa, Artificial Sequence
  Description of Artificial Sequence: Synthetic polypeptide
GSTSSTAESPGPGSTSSTAESPGPGSTSESPSGTAPGSTSSTAESPGPGSTSSTAESPGPGTSTPESGSASPGSTSESPSGTAPGTSPSGESSTAPGSTSESPSGTAPGSTSESPSGTAPGTSPSGESSTAPGSTSESPSGTAPGSTSESPSGTAPGTSPSGESSTAPGSTSESPSGTAPGSTSESPSGTAPGSTSESPSGTAPGTSTPESGSASPGSTSESPSGTAPGTSTPESGSASPGSTSSTAESPGPGSTSSTAESPGPGTSTPESGSASPGTSTPESGSASPGSTSESPSGTAPGTSTPESGSASPGTSTPESGSASPGSTSESPSGTAPGSTSESPSGTAPGSTSESPSGTAPGSTSSTAESPGPGTSTPESGSASPGTSTPESGSASPGSTSESPSGTAPGSTSESPSGTAPGTSTPESGSASPGSTSESPSGTAPGSTSESPSGTAPGTSTPESGSASPGTSPSGESSTAPGSTSSTAESPGPGTSPSGESSTAPGSTSSTAESPGPGTSTPESGSASPGSTSESPSGTAPGSTSSTAESPGPGTSTPESGSASPGTSTPESGSASPGTAPRSLRRSSCFGGRMDRIGAQSGLGCNSFRY

SEQ ID NO: 1460 - protein, 869 aa, Artificial Sequence
  Description of Artificial Sequence: Synthetic polypeptide
GSSESGSSEGGPGSSESGSSEGGPGESPGGSSGSESGSGGEPSESGSSGESPGGSSGSESGESPGGSSGSESGSSESGSSEGGPGSSESGSSEGGPGSSESGSSEGGPGESPGGSSGSESGESPGGSSGSESGESPGGSSGSESGSSESGSSEGGPGSSESGSSEGGPGSSESGSSEGGPGSSESGSSEGGPGSSESGSSEGGPGSSESGSSEGGPGSGGEPSESGSSGESPGGSSGSESGESPGGSSGSESGSGGEPSESGSSGSEGSSGPGESSGSSESGSSEGGPGSGGEPSESGSSGSEGSSGPGESSGSSESGSSEGGPGSGGEPSESGSSGESPGGSSGSESGSGGEPSESGSSGSGGEPSESGSSGSSESGSSEGGPGSGGEPSESGSSGSGGEPSESGSSGSEGSSGPGESSGESPGGSSGSESGSEGSSGPGESSGSEGSSGPGESSGSGGEPSESGSSGSSESGSSEGGPGSSESGSSEGGPGESPGGSSGSESGSGGEPSESGSSGSEGSSGPGESSGESPGGSSGSESGSEGSSGPGSSESGSSEGGPGSGGEPSESGSSGSEGSSGPGESSGSEGSSGPGESSGSEGSSGPGESSGSGGEPSESGSSGSGGEPSESGSSGESPGGSSGSESGESPGGSSGSESGSGGEPSESGSSGSEGSSGPGESSGESPGGSSGSESGSSESGSSEGGPGSSESGSSEGGPGSSESGSSEGGPGSGGEPSESGSSGSSESGSSEGGPGESPGGSSGSESGSGGEPSESGSSGSSESGSSEGGPGESPGGSSGSESGSGGEPSESGSSGESPGGSSGSESGSGGEPSESGSSGTAPRSLRRSSCFGGRMDRIGAQSGLGCNSFRY

SEQ ID NO: 1461 - protein, 897 aa, Artificial Sequence
  Description of Artificial Sequence: Synthetic polypeptide
GSPAGSPTSTEEGTSESATPESGPGTSTEPSEGSAPGSPAGSPTSTEEGTSTEPSEGSAPGTSTEPSEGSAPGTSESATPESGPGSEPATSGSETPGSEPATSGSETPGSPAGSPTSTEEGTSESATPESGPGTSTEPSEGSAPGTSTEPSEGSAPGSPAGSPTSTEEGTSTEPSEGSAPGTSTEPSEGSAPGTSESATPESGPGTSTEPSEGSAPGTSESATPESGPGSEPATSGSETPGTSTEPSEGSAPGTSTEPSEGSAPGTSESATPESGPGTSESATPESGPGSPAGSPTSTEEGTSESATPESGPGSEPATSGSETPGTSESATPESGPGTSTEPSEGSAPGTSTEPSEGSAPGTSTEPSEGSAPGTSTEPSEGSAPGTSTEPSEGSAPGTSTEPSEGSAPGSPAGSPTSTEEGTSTEPSEGSAPGTSESATPESGPGSEPATSGSETPGTSESATPESGPGSEPATSGSETPGTSESATPESGPGTSTEPSEGSAPGTSESATPESGPGSPAGSPTSTEEGSPAGSPTSTEEGSPAGSPTSTEEGTSESATPESGPGTSTEPSEGSAPGTSESATPESGPGSEPATSGSETPGTSESATPESGPGSEPATSGSETPGTSESATPESGPGTSTEPSEGSAPGSPAGSPTSTEEGTSESATPESGPGSEPATSGSETPGTSESATPESGPGSPAGSPTSTEEGSPAGSPTSTEEGTSTEPSEGSAPGTSESATPESGPGTSESATPESGPGTSESATPESGPGSEPATSGSETPGSEPATSGSETPGSPAGSPTSTEEGTSTEPSEGSAPGTSTEPSEGSAPGSEPATSGSETPGTSESATPESGPGTSTEPSEGSAPGTAPRSLRRSSCFGGRMDRIGAQSGLGCNSFRY

SEQ ID NO: 1462 - protein, 908 aa, Artificial Sequence
  Description of Artificial Sequence: Synthetic polypeptide
  MOD_RES (430)..(432): Any amino acid
  MOD_RES (443)..(446): Any amino acid
GSTSESPSGTAPGTSPSGESSTAPGSTSESPSGTAPGSTSESPSGTAPGTSTPESGSASPGTSTPESGSASPGSTSESPSGTAPGSTSESPSGTAPGTSPSGESSTAPGSTSESPSGTAPGTSPSGESSTAPGTSPSGESSTAPGSTSSTAESPGPGTSPSGESSTAPGTSPSGESSTAPGSTSSTAESPGPGTSTPESGSASPGTSTPESGSASPGSTSESPSGTAPGSTSESPSGTAPGTSTPESGSASPGSTSSTAESPGPGTSTPESGSASPGSTSESPSGTAPGTSPSGESSTAPGSTSSTAESPGPGTSPSGESSTAPGTSTPESGSASPGSTSSTAESPGPGSTSSTAESPGPGSTSSTAESPGPGSTSSTAESPGPGTSPSGESSTAPGSTSESPSGTAPGSTSESPSGTAPGTSTPESGPXXXGASASGAPSTXXXXSESPSGTAPGSTSESPSGTAPGSTSESPSGTAPGSTSESPSGTAPGSTSESPSGTAPGSTSESPSGTAPGTSTPESGSASPGTSPSGESSTAPGTSPSGESSTAPGSTSSTAESPGPGTSPSGESSTAPGTSTPESGSASPGSTSESPSGTAPGSTSESPSGTAPGTSPSGESSTAPGSTSESPSGTAPGTSTPESGSASPGTSTPESGSASPGSTSESPSGTAPGTSTPESGSASPGSTSSTAESPGPGSTSESPSGTAPGSTSESPSGTAPGTSPSGESSTAPGSTSSTAESPGPGTSPSGESSTAPGTSTPESGSASPGTSPSGESSTAPGTSPSGESSTAPGTSPSGESSTAPGSTSSTAESPGPGSTSSTAESPGPGTSPSGESSTAPGSSPSASTGTGPGSSTPSGATGSPGSSTPSGATGSPGTAPRSLRRSSCFGGRMDRIGAQSGLGCNSFRY

SEQ ID NO: 1463 - protein, 897 aa, Artificial Sequence
  Description of Artificial Sequence: Synthetic polypeptide
GASPGTSSTGSPGSSPSASTGTGPGSSPSASTGTGPGTPGSGTASSSPGSSTPSGATGSPGSNPSASTGTGPGASPGTSSTGSPGTPGSGTASSSPGSSTPSGATGSPGTPGSGTASSSPGASPGTSSTGSPGASPGTSSTGSPGTPGSGTASSSPGSSTPSGATGSPGASPGTSSTGSPGTPGSGTASSSPGSSTPSGATGSPGSNPSASTGTGPGSSPSASTGTGPGSSTPSGATGSPGSSTPSGATGSPGASPGTSSTGSPGASPGTSSTGSPGASPGTSSTGSPGTPGSGTASSSPGASPGTSSTGSPGASPGTSSTGSPGASPGTSSTGSPGSSPSASTGTGPGTPGSGTASSSPGASPGTSSTGSPGASPGTSSTGSPGASPGTSSTGSPGSSTPSGATGSPGSSTPSGATGSPGASPGTSSTGSPGTPGSGTASSSPGSSTPSGATGSPGSSTPSGATGSPGSSTPSGATGSPGSSPSASTGTGPGASPGTSSTGSPGASPGTSSTGSPGTPGSGTASSSPGASPGTSSTGSPGASPGTSSTGSPGASPGTSSTGSPGASPGTSSTGSPGTPGSGTASSSPGSSTPSGATGSPGTPGSGTASSSPGSSTPSGATGSPGTPGSGTASSSPGSSTPSGATGSPGSSTPSGATGSPGSSPSASTGTGPGSSPSASTGTGPGASPGTSSTGSPGTPGSGTASSSPGSSTPSGATGSPGSSPSASTGTGPGSSPSASTGTGPGASPGTSSTGSPGASPGTSSTGSPGSSTPSGATGSPGSSPSASTGTGPGASPGTSSTGSPGSSPSASTGTGPGTPGSGTASSSPGSSTPSGATGSPGSSTPSGATGSPGASPGTSSTGSPGTAPRSLRRSSCFGGRMDRIGAQSGLGCNSFRY

SEQ ID NO: 1464 - protein, 908 aa, Artificial Sequence
  Description of Artificial Sequence: Synthetic polypeptide
GTSTEPSEGSAPGSEPATSGSETPGSPAGSPTSTEEGSTSSTAESPGPGTSTPESGSASPGSTSESPSGTAPGSTSESPSGTAPGTSTPESGSASPGTSTPESGSASPGSEPATSGSETPGTSESATPESGPGSPAGSPTSTEEGTSTEPSEGSAPGTSESATPESGPGTSTEPSEGSAPGTSTEPSEGSAPGSPAGSPTSTEEGTSTEPSEGSAPGTSTEPSEGSAPGTSESATPESGPGTSESATPESGPGTSTEPSEGSAPGTSTEPSEGSAPGTSESATPESGPGTSTEPSEGSAPGSEPATSGSETPGSPAGSPTSTEEGSSTPSGATGSPGTPGSGTASSSPGSSTPSGATGSPGTSTEPSEGSAPGTSTEPSEGSAPGSEPATSGSETPGSPAGSPTSTEEGSPAGSPTSTEEGTSTEPSEGSAPGASASGAPSTGGTSESATPESGPGSPAGSPTSTEEGSPAGSPTSTEEGSTSSTAESPGPGSTSESPSGTAPGTSPSGESSTAPGTPGSGTASSSPGSSTPSGATGSPGSSPSASTGTGPGSEPATSGSETPGTSESATPESGPGSEPATSGSETPGSTSSTAESPGPGSTSSTAESPGPGTSPSGESSTAPGSEPATSGSETPGSEPATSGSETPGTSTEPSEGSAPGSTSSTAESPGPGTSTPESGSASPGSTSESPSGTAPGTSTEPSEGSAPGTSTEPSEGSAPGTSTEPSEGSAPGSSTPSGATGSPGSSPSASTGTGPGASPGTSSTGSPGSEPATSGSETPGTSESATPESGPGSPAGSPTSTEEGSSTPSGATGSPGSSPSASTGTGPGASPGTSSTGSPGTSESATPESGPGTSTEPSEGSAPGTSTEPSEGSAPGTAPRSLRRSSCFGGRMDRIGAQSGLGCNSFRY

SEQ ID NO: 1465 - protein, 1351 aa, Artificial Sequence
  Description of Artificial Sequence: Synthetic polypeptide
GTSTEPSEGSAPGSEPATSGSETPGSPAGSPTSTEEGSTSSTAESPGPGTSTPESGSASPGSTSESPSGTAPGSTSESPSGTAPGTSTPESGSASPGTSTPESGSASPGSEPATSGSETPGTSESATPESGPGSPAGSPTSTEEGTSTEPSEGSAPGTSESATPESGPGTSTEPSEGSAPGTSTEPSEGSAPGSPAGSPTSTEEGTSTEPSEGSAPGTSTEPSEGSAPGTSESATPESGPGTSESATPESGPGTSTEPSEGSAPGTSTEPSEGSAPGTSESATPESGPGTSTEPSEGSAPGSEPATSGSETPGSPAGSPTSTEEGSSTPSGATGSPGTPGSGTASSSPGSSTPSGATGSPGTSTEPSEGSAPGTSTEPSEGSAPGSEPATSGSETPGSPAGSPTSTEEGSPAGSPTSTEEGTSTEPSEGSAPGPEPTGPAPSGGSEPATSGSETPGTSESATPESGPGSPAGSPTSTEEGTSESATPESGPGSPAGSPTSTEEGSPAGSPTSTEEGTSESATPESGPGSPAGSPTSTEEGSPAGSPTSTEEGSTSSTAESPGPGSTSESPSGTAPGTSPSGESSTAPGSTSESPSGTAPGSTSESPSGTAPGTSPSGESSTAPGTSTEPSEGSAPGTSESATPESGPGTSESATPESGPGSEPATSGSETPGTSESATPESGPGTSESATPESGPGTSTEPSEGSAPGTSESATPESGPGTSTEPSEGSAPGTSPSGESSTAPGTSPSGESSTAPGTSPSGESSTAPGTSTEPSEGSAPGSPAGSPTSTEEGTSTEPSEGSAPGSSPSASTGTGPGSSTPSGATGSPGSSTPSGATGSPGSSTPSGATGSPGSSTPSGATGSPGASPGTSSTGSPGASASGAPSTGGTSPSGESSTAPGSTSSTAESPGPGTSPSGESSTAPGTSESATPESGPGTSTEPSEGSAPGTSTEPSEGSAPGSSPSASTGTGPGSSTPSGATGSPGASPGTSSTGSPGTSTPESGSASPGTSPSGESSTAPGTSPSGESSTAPGTSESATPESGPGSEPATSGSETPGTSTEPSEGSAPGSTSESPSGTAPGSTSESPSGTAPGTSTPESGSASPGSPAGSPTSTEEGTSESATPESGPGTSTEPSEGSAPGSPAGSPTSTEEGTSESATPESGPGSEPATSGSETPGSSTPSGATGSPGASPGTSSTGSPGSSTPSGATGSPGSTSESPSGTAPGTSPSGESSTAPGSTSSTAESPGPGSSTPSGATGSPGASPGTSSTGSPGTPGSGTASSSPGSPAGSPTSTEEGSPAGSPTSTEEGTSTEPSEGSAPGTAPRSLRRSSCFGGRMDRIGAQSGLGCNSFRY

SEQ ID NO: 1466 - protein, 186 aa, Artificial Sequence
  Description of Artificial Sequence: Synthetic polypeptide
IVLSLDVPIGLLQILLEQARARAAREQATTNARILARVGHCGGSEPATSGSETPGTSESATPESGPGSEPATSGSETPGSPAGSPTSTEEGTSTEPSEGSAPGSEPATSGSETPGSEPATSGSETPGSEPATSGSETPGTSTEPSEGSAPGTSESATPESGPGSEPATSGSETPGTSTEPSEGSAP

SEQ ID NO: 1467 - protein, 186 aa, Artificial Sequence
  Description of Artificial Sequence: Synthetic polypeptide
IVLSLDVPIGLLQILLEQARARAAREQATTNARILARVGHCGGTSTPESGSASPGTSPSGESSTAPGTSPSGESSTAPGSTSSTAESPGPGSTSESPSGTAPGSTSSTAESPGPGTSPSGESSTAPGTSTPESGSASPGSTSSTAESPGPGTSPSGESSTAPGTSPSGESSTAPGTSPSGESSTAP

SEQ ID NO: 1468 - protein, 330 aa, Artificial Sequence
  Description of Artificial Sequence: Synthetic polypeptide
IVLSLDVPIGLLQILLEQARARAAREQATTNARILARVGHCGGTSESATPESGPGSEPATSGSETPGTSESATPESGPGSEPATSGSETPGTSESATPESGPGTSTEPSEGSAPGSPAGSPTSTEEGTSESATPESGPGSEPATSGSETPGTSESATPESGPGSPAGSPTSTEEGSPAGSPTSTEEGTSTEPSEGSAPGTSESATPESGPGTSESATPESGPGTSESATPESGPGSEPATSGSETPGSEPATSGSETPGSPAGSPTSTEEGTSTEPSEGSAPGTSTEPSEGSAPGSEPATSGSETPGTSESATPESGPGTSTEPSEGSAP

SEQ ID NO: 1469 - protein, 618 aa, Artificial Sequence
  Description of Artificial Sequence: Synthetic polypeptide
IVLSLDVPIGLLQILLEQARARAAREQATTNARILARVGHCGGSPAGSPTSTEEGTSESATPESGPGTSTEPSEGSAPGSPAGSPTSTEEGTSTEPSEGSAPGTSTEPSEGSAPGTSESATPESGPGSEPATSGSETPGSEPATSGSETPGSPAGSPTSTEEGTSESATPESGPGTSTEPSEGSAPGTSTEPSEGSAPGSPAGSPTSTEEGTSTEPSEGSAPGTSTEPSEGSAPGTSESATPESGPGTSTEPSEGSAPGTSESATPESGPGSEPATSGSETPGTSTEPSEGSAPGTSTEPSEGSAPGTSESATPESGPGTSESATPESGPGSPAGSPTSTEEGTSESATPESGPGSEPATSGSETPGTSESATPESGPGTSTEPSEGSAPGTSTEPSEGSAPGTSTEPSEGSAPGTSTEPSEGSAPGTSTEPSEGSAPGTSTEPSEGSAPGSPAGSPTSTEEGTSTEPSEGSAPGTSESATPESGPGSEPATSGSETPGTSESATPESGPGSEPATSGSETPGTSESATPESGPGTSTEPSEGSAPGTSESATPESGPGSPAGSPTSTEEGSPAGSPTSTEEGSPAGSPTSTEEGTSESATPESGPGTSTEPSEGSAP

SEQ ID NO: 1470 - protein, 618 aa, Artificial Sequence
  Description of Artificial Sequence: Synthetic polypeptide
IVLSLDVPIGLLQILLEQARARAAREQATTNARILARVGHCGGSTSSTAESPGPGSTSSTAESPGPGSTSESPSGTAPGSTSSTAESPGPGSTSSTAESPGPGTSTPESGSASPGSTSESPSGTAPGTSPSGESSTAPGSTSESPSGTAPGSTSESPSGTAPGTSPSGESSTAPGSTSESPSGTAPGSTSESPSGTAPGTSPSGESSTAPGSTSESPSGTAPGSTSESPSGTAPGSTSESPSGTAPGTSTPESGSASPGSTSESPSGTAPGTSTPESGSASPGSTSSTAESPGPGSTSSTAESPGPGTSTPESGSASPGTSTPESGSASPGSTSESPSGTAPGTSTPESGSASPGTSTPESGSASPGSTSESPSGTAPGSTSESPSGTAPGSTSESPSGTAPGSTSSTAESPGPGTSTPESGSASPGTSTPESGSASPGSTSESPSGTAPGSTSESPSGTAPGTSTPESGSASPGSTSESPSGTAPGSTSESPSGTAPGTSTPESGSASPGTSPSGESSTAPGSTSSTAESPGPGTSPSGESSTAPGSTSSTAESPGPGTSTPESGSASPGSTSESPSGTAPGSTSSTAESPGPGTSTPESGSASPGTSTPESGSASP

SEQ ID NO: 1471 - protein, 878 aa, Artificial Sequence
  Description of Artificial Sequence: Synthetic polypeptide
IVLSLDVPIGLLQILLEQARARAAREQATTNARILARVGHCGGSSESGSSEGGPGSSESGSSEGGPGESPGGSSGSESGSGGEPSESGSSGESPGGSSGSESGESPGGSSGSESGSSESGSSEGGPGSSESGSSEGGPGSSESGSSEGGPGESPGGSSGSESGESPGGSSGSESGESPGGSSGSESGSSESGSSEGGPGSSESGSSEGGPGSSESGSSEGGPGSSESGSSEGGPGSSESGSSEGGPGSSESGSSEGGPGSGGEPSESGSSGESPGGSSGSESGESPGGSSGSESGSGGEPSESGSSGSEGSSGPGESSGSSESGSSEGGPGSGGEPSESGSSGSEGSSGPGESSGSSESGSSEGGPGSGGEPSESGSSGESPGGSSGSESGSGGEPSESGSSGSGGEPSESGSSGSSESGSSEGGPGSGGEPSESGSSGSGGEPSESGSSGSEGSSGPGESSGESPGGSSGSESGSEGSSGPGESSGSEGSSGPGESSGSGGEPSESGSSGSSESGSSEGGPGSSESGSSEGGPGESPGGSSGSESGSGGEPSESGSSGSEGSSGPGESSGESPGGSSGSESGSEGSSGPGSSESGSSEGGPGSGGEPSESGSSGSEGSSGPGESSGSEGSSGPGESSGSEGSSGPGESSGSGGEPSESGSSGSGGEPSESGSSGESPGGSSGSESGESPGGSSGSESGSGGEPSESGSSGSEGSSGPGESSGESPGGSSGSESGSSESGSSEGGPGSSESGSSEGGPGSSESGSSEGGPGSGGEPSESGSSGSSESGSSEGGPGESPGGSSGSESGSGGEPSESGSSGSSESGSSEGGPGESPGGSSGSESGSGGEPSESGSSGESPGGSSGSESGSGGEPSESGSS

SEQ ID NO: 1472 - protein, 906 aa, Artificial Sequence
  Description of Artificial Sequence: Synthetic polypeptide
IVLSLDVPIGLLQILLEQARARAAREQATTNARILARVGHCGGSPAGSPTSTEEGTSESATPESGPGTSTEPSEGSAPGSPAGSPTSTEEGTSTEPSEGSAPGTSTEPSEGSAPGTSESATPESGPGSEPATSGSETPGSEPATSGSETPGSPAGSPTSTEEGTSESATPESGPGTSTEPSEGSAPGTSTEPSEGSAPGSPAGSPTSTEEGTSTEPSEGSAPGTSTEPSEGSAPGTSESATPESGPGTSTEPSEGSAPGTSESATPESGPGSEPATSGSETPGTSTEPSEGSAPGTSTEPSEGSAPGTSESATPESGPGTSESATPESGPGSPAGSPTSTEEGTSESATPESGPGSEPATSGSETPGTSESATPESGPGTSTEPSEGSAPGTSTEPSEGSAPGTSTEPSEGSAPGTSTEPSEGSAPGTSTEPSEGSAPGTSTEPSEGSAPGSPAGSPTSTEEGTSTEPSEGSAPGTSESATPESGPGSEPATSGSETPGTSESATPESGPGSEPATSGSETPGTSESATPESGPGTSTEPSEGSAPGTSESATPESGPGSPAGSPTSTEEGSPAGSPTSTEEGSPAGSPTSTEEGTSESATPESGPGTSTEPSEGSAPGTSESATPESGPGSEPATSGSETPGTSESATPESGPGSEPATSGSETPGTSESATPESGPGTSTEPSEGSAPGSPAGSPTSTEEGTSESATPESGPGSEPATSGSETPGTSESATPESGPGSPAGSPTSTEEGSPAGSPTSTEEGTSTEPSEGSAPGTSESATPESGPGTSESATPESGPGTSESATPESGPGSEPATSGSETPGSEPATSGSETPGSPAGSPTSTEEGTSTEPSEGSAPGTSTEPSEGSAPGSEPATSGSETPGTSESATPESGPGTSTEPSEGSAP

SEQ ID NO: 1473 - protein, 917 aa, Artificial Sequence
  Description of Artificial Sequence: Synthetic polypeptide
  MOD_RES (472)..(474): Any amino acid
  MOD_RES (485)..(488): Any amino acid
IVLSLDVPIGLLQILLEQARARAAREQATTNARILARVGHCGGSTSESPSGTAPGTSPSGESSTAPGSTSESPSGTAPGSTSESPSGTAPGTSTPESGSASPGTSTPESGSASPGSTSESPSGTAPGSTSESPSGTAPGTSPSGESSTAPGSTSESPSGTAPGTSPSGESSTAPGTSPSGESSTAPGSTSSTAESPGPGTSPSGESSTAPGTSPSGESSTAPGSTSSTAESPGPGTSTPESGSASPGTSTPESGSASPGSTSESPSGTAPGSTSESPSGTAPGTSTPESGSASPGSTSSTAESPGPGTSTPESGSASPGSTSESPSGTAPGTSPSGESSTAPGSTSSTAESPGPGTSPSGESSTAPGTSTPESGSASPGSTSSTAESPGPGSTSSTAESPGPGSTSSTAESPGPGSTSSTAESPGPGTSPSGESSTAPGSTSESPSGTAPGSTSESPSGTAPGTSTPESGPXXXGASASGAPSTXXXXSESPSGTAPGSTSESPSGTAPGSTSESPSGTAPGSTSESPSGTAPGSTSESPSGTAPGSTSESPSGTAPGTSTPESGSASPGTSPSGESSTAPGTSPSGESSTAPGSTSSTAESPGPGTSPSGESSTAPGTSTPESGSASPGSTSESPSGTAPGSTSESPSGTAPGTSPSGESSTAPGSTSESPSGTAPGTSTPESGSASPGTSTPESGSASPGSTSESPSGTAPGTSTPESGSASPGSTSSTAESPGPGSTSESPSGTAPGSTSESPSGTAPGTSPSGESSTAPGSTSSTAESPGPGTSPSGESSTAPGTSTPESGSASPGTSPSGESSTAPGTSPSGESSTAPGTSPSGESSTAPGSTSSTAESPGPGSTSSTAESPGPGTSPSGESSTAPGSSPSASTGTGPGSSTPSGATGSPGSSTPSGATGSP

SEQ ID NO: 1474 - protein, 906 aa, Artificial Sequence
  Description of Artificial Sequence: Synthetic polypeptide
IVLSLDVPIGLLQILLEQARARAAREQATTNARILARVGHCGGASPGTSSTGSPGSSPSASTGTGPGSSPSASTGTGPGTPGSGTASSSPGSSTPSGATGSPGSNPSASTGTGPGASPGTSSTGSPGTPGSGTASSSPGSSTPSGATGSPGTPGSGTASSSPGASPGTSSTGSPGASPGTSSTGSPGTPGSGTASSSPGSSTPSGATGSPGASPGTSSTGSPGTPGSGTASSSPGSSTPSGATGSPGSNPSASTGTGPGSSPSASTGTGPGSSTPSGATGSPGSSTPSGATGSPGASPGTSSTGSPGASPGTSSTGSPGASPGTSSTGSPGTPGSGTASSSPGASPGTSSTGSPGASPGTSSTGSPGASPGTSSTGSPGSSPSASTGTGPGTPGSGTASSSPGASPGTSSTGSPGASPGTSSTGSPGASPGTSSTGSPGSSTPSGATGSPGSSTPSGATGSPGASPGTSSTGSPGTPGSGTASSSPGSSTPSGATGSPGSSTPSGATGSPGSSTPSGATGSPGSSPSASTGTGPGASPGTSSTGSPGASPGTSSTGSPGTPGSGTASSSPGASPGTSSTGSPGASPGTSSTGSPGASPGTSSTGSPGASPGTSSTGSPGTPGSGTASSSPGSSTPSGATGSPGTPGSGTASSSPGSSTPSGATGSPGTPGSGTASSSPGSSTPSGATGSPGSSTPSGATGSPGSSPSASTGTGPGSSPSASTGTGPGASPGTSSTGSPGTPGSGTASSSPGSSTPSGATGSPGSSPSASTGTGPGSSPSASTGTGPGASPGTSSTGSPGASPGTSSTGSPGSSTPSGATGSPGSSPSASTGTGPGASPGTSSTGSPGSSPSASTGTGPGTPGSGTASSSPGSSTPSGATGSPGSSTPSGATGSPGASPGTSSTGSP

SEQ ID NO: 1475 - protein, 917 aa, Artificial Sequence
  Description of Artificial Sequence: Synthetic polypeptide
IVLSLDVPIGLLQILLEQARARAAREQATTNARILARVGHCGGTSTEPSEGSAPGSEPATSGSETPGSPAGSPTSTEEGSTSSTAESPGPGTSTPESGSASPGSTSESPSGTAPGSTSESPSGTAPGTSTPESGSASPGTSTPESGSASPGSEPATSGSETPGTSESATPESGPGSPAGSPTSTEEGTSTEPSEGSAPGTSESATPESGPGTSTEPSEGSAPGTSTEPSEGSAPGSPAGSPTSTEEGTSTEPSEGSAPGTSTEPSEGSAPGTSESATPESGPGTSESATPESGPGTSTEPSEGSAPGTSTEPSEGSAPGTSESATPESGPGTSTEPSEGSAPGSEPATSGSETPGSPAGSPTSTEEGSSTPSGATGSPGTPGSGTASSSPGSSTPSGATGSPGTSTEPSEGSAPGTSTEPSEGSAPGSEPATSGSETPGSPAGSPTSTEEGSPAGSPTSTEEGTSTEPSEGSAPGASASGAPSTGGTSESATPESGPGSPAGSPTSTEEGSPAGSPTSTEEGSTSSTAESPGPGSTSESPSGTAPGTSPSGESSTAPGTPGSGTASSSPGSSTPSGATGSPGSSPSASTGTGPGSEPATSGSETPGTSESATPESGPGSEPATSGSETPGSTSSTAESPGPGSTSSTAESPGPGTSPSGESSTAPGSEPATSGSETPGSEPATSGSETPGTSTEPSEGSAPGSTSSTAESPGPGTSTPESGSASPGSTSESPSGTAPGTSTEPSEGSAPGTSTEPSEGSAPGTSTEPSEGSAPGSSTPSGATGSPGSSPSASTGTGPGASPGTSSTGSPGSEPATSGSETPGTSESATPESGPGSPAGSPTSTEEGSSTPSGATGSPGSSPSASTGTGPGASPGTSSTGSPGTSESATPESGPGTSTEPSEGSAPGTSTEPSEGSAP

SEQ ID NO: 1476 - protein, 1360 aa, Artificial Sequence
  Description of Artificial Sequence: Synthetic polypeptide
IVLSLDVPIGLLQILLEQARARAAREQATTNARILARVGHCGGTSTEPSEGSAPGSEPATSGSETPGSPAGSPTSTEEGSTSSTAESPGPGTSTPESGSASPGSTSESPSGTAPGSTSESPSGTAPGTSTPESGSASPGTSTPESGSASPGSEPATSGSETPGTSESATPESGPGSPAGSPTSTEEGTSTEPSEGSAPGTSESATPESGPGTSTEPSEGSAPGTSTEPSEGSAPGSPAGSPTSTEEGTSTEPSEGSAPGTSTEPSEGSAPGTSESATPESGPGTSESATPESGPGTSTEPSEGSAPGTSTEPSEGSAPGTSESATPESGPGTSTEPSEGSAPGSEPATSGSETPGSPAGSPTSTEEGSSTPSGATGSPGTPGSGTASSSPGSSTPSGATGSPGTSTEPSEGSAPGTSTEPSEGSAPGSEPATSGSETPGSPAGSPTSTEEGSPAGSPTSTEEGTSTEPSEGSAPGPEPTGPAPSGGSEPATSGSETPGTSESATPESGPGSPAGSPTSTEEGTSESATPESGPGSPAGSPTSTEEGSPAGSPTSTEEGTSESATPESGPGSPAGSPTSTEEGSPAGSPTSTEEGSTSSTAESPGPGSTSESPSGTAPGTSPSGESSTAPGSTSESPSGTAPGSTSESPSGTAPGTSPSGESSTAPGTSTEPSEGSAPGTSESATPESGPGTSESATPESGPGSEPATSGSETPGTSESATPESGPGTSESATPESGPGTSTEPSEGSAPGTSESATPESGPGTSTEPSEGSAPGTSPSGESSTAPGTSPSGESSTAPGTSPSGESSTAPGTSTEPSEGSAPGSPAGSPTSTEEGTSTEPSEGSAPGSSPSASTGTGPGSSTPSGATGSPGSSTPSGATGSPGSSTPSGATGSPGSSTPSGATGSPGASPGTSSTGSPGASASGAPSTGGTSPSGESSTAPGSTSSTAESPGPGTSPSGESSTAPGTSESATPESGPGTSTEPSEGSAPGTSTEPSEGSAPGSSPSASTGTGPGSSTPSGATGSPGASPGTSSTGSPGTSTPESGSASPGTSPSGESSTAPGTSPSGESSTAPGTSESATPESGPGSEPATSGSETPGTSTEPSEGSAPGSTSESPSGTAPGSTSESPSGTAPGTSTPESGSASPGSPAGSPTSTEEGTSESATPESGPGTSTEPSEGSAPGSPAGSPTSTEEGTSESATPESGPGSEPATSGSETPGSSTPSGATGSPGASPGTSSTGSPGSSTPSGATGSPGSTSESPSGTAPGTSPSGESSTAPGSTSSTAESPGPGSSTPSGATGSPGASPGTSSTGSPGTPGSGTASSSPGSPAGSPTSTEEGSPAGSPTSTEEGTSTEPSEGSAP

SEQ ID NO: 1477 - protein, 955 aa, Artificial Sequence
  Description of Artificial Sequence: Synthetic polypeptide
MAEPAGSPTSTEEGTPGSGTASSSPGSSTPSGATGSPGASPGTSSTGSPGSPAGSPTSTEEGTSESATPESGPGTSTEPSEGSAPGSPAGSPTSTEEGTSTEPSEGSAPGTSTEPSEGSAPGTSESATPESGPGSEPATSGSETPGSEPATSGSETPGSPAGSPTSTEEGTSESATPESGPGTSTEPSEGSAPGTSTEPSEGSAPGSPAGSPTSTEEGTSTEPSEGSAPGTSTEPSEGSAPGTSESATPESGPGTSTEPSEGSAPGTSESATPESGPGSEPATSGSETPGTSTEPSEGSAPGTSTEPSEGSAPGTSESATPESGPGTSESATPESGPGSPAGSPTSTEEGTSESATPESGPGSEPATSGSETPGTSESATPESGPGTSTEPSEGSAPGTSTEPSEGSAPGTSTEPSEGSAPGTSTEPSEGSAPGTSTEPSEGSAPGTSTEPSEGSAPGSPAGSPTSTEEGTSTEPSEGSAPGTSESATPESGPGSEPATSGSETPGTSESATPESGPGSEPATSGSETPGTSESATPESGPGTSTEPSEGSAPGTSESATPESGPGSPAGSPTSTEEGSPAGSPTSTEEGSPAGSPTSTEEGTSESATPESGPGTSTEPSEGSAPGTSESATPESGPGSEPATSGSETPGTSESATPESGPGSEPATSGSETPGTSESATPESGPGTSTEPSEGSAPGSPAGSPTSTEEGTSESATPESGPGSEPATSGSETPGTSESATPESGPGSPAGSPTSTEEGSPAGSPTSTEEGTSTEPSEGSAPGTSESATPESGPGTSESATPESGPGTSESATPESGPGSEPATSGSETPGSEPATSGSETPGSPAGSPTSTEEGTSTEPSEGSAPGTSTEPSEGSAPGSEPATSGSETPGTSESATPESGPGTSTEPSEGSAPGIVLSLDVPIGLLQILLEQARARAAREQATTNARILARVGHC

SEQ ID NO: 1478 - protein, 966 aa, Artificial Sequence
  Description of Artificial Sequence: Synthetic polypeptide
MAEPAGSPTSTEEGASPGTSSTGSPGSSTPSGATGSPGSSTPSGATGSPGTSTEPSEGSAPGSEPATSGSETPGSPAGSPTSTEEGSTSSTAESPGPGTSTPESGSASPGSTSESPSGTAPGSTSESPSGTAPGTSTPESGSASPGTSTPESGSASPGSEPATSGSETPGTSESATPESGPGSPAGSPTSTEEGTSTEPSEGSAPGTSESATPESGPGTSTEPSEGSAPGTSTEPSEGSAPGSPAGSPTSTEEGTSTEPSEGSAPGTSTEPSEGSAPGTSESATPESGPGTSESATPESGPGTSTEPSEGSAPGTSTEPSEGSAPGTSESATPESGPGTSTEPSEGSAPGSEPATSGSETPGSPAGSPTSTEEGSSTPSGATGSPGTPGSGTASSSPGSSTPSGATGSPGTSTEPSEGSAPGTSTEPSEGSAPGSEPATSGSETPGSPAGSPTSTEEGSPAGSPTSTEEGTSTEPSEGSAPGASASGAPSTGGTSESATPESGPGSPAGSPTSTEEGSPAGSPTSTEEGSTSSTAESPGPGSTSESPSGTAPGTSPSGESSTAPGTPGSGTASSSPGSSTPSGATGSPGSSPSASTGTGPGSEPATSGSETPGTSESATPESGPGSEPATSGSETPGSTSSTAESPGPGSTSSTAESPGPGTSPSGESSTAPGSEPATSGSETPGSEPATSGSETPGTSTEPSEGSAPGSTSSTAESPGPGTSTPESGSASPGSTSESPSGTAPGTSTEPSEGSAPGTSTEPSEGSAPGTSTEPSEGSAPGSSTPSGATGSPGSSPSASTGTGPGASPGTSSTGSPGSEPATSGSETPGTSESATPESGPGSPAGSPTSTEEGSSTPSGATGSPGSSPSASTGTGPGASPGTSSTGSPGTSESATPESGPGTSTEPSEGSAPGTSTEPSEGSAPGIVLSLDVPIGLLQILLEQARARAAREQATTNARILARVGHC

SEQ ID NO: 1479 - protein, 186 aa, Artificial Sequence
  Description of Artificial Sequence: Synthetic polypeptide
GSEPATSGSETPGTSESATPESGPGSEPATSGSETPGSPAGSPTSTEEGTSTEPSEGSAPGSEPATSGSETPGSEPATSGSETPGSEPATSGSETPGTSTEPSEGSAPGTSESATPESGPGSEPATSGSETPGTSTEPSEGSAPGIVLSLDVPIGLLQILLEQARARAAREQATTNARILARVGHC

SEQ ID NO: 1480 - protein, 186 aa, Artificial Sequence
  Description of Artificial Sequence: Synthetic polypeptide
GTSTPESGSASPGTSPSGESSTAPGTSPSGESSTAPGSTSSTAESPGPGSTSESPSGTAPGSTSSTAESPGPGTSPSGESSTAPGTSTPESGSASPGSTSSTAESPGPGTSPSGESSTAPGTSPSGESSTAPGTSPSGESSTAPGIVLSLDVPIGLLQILLEQARARAAREQATTNARILARVGHC

SEQ ID NO: 1481 - protein, 330 aa, Artificial Sequence
  Description of Artificial Sequence: Synthetic polypeptide
GTSESATPESGPGSEPATSGSETPGTSESATPESGPGSEPATSGSETPGTSESATPESGPGTSTEPSEGSAPGSPAGSPTSTEEGTSESATPESGPGSEPATSGSETPGTSESATPESGPGSPAGSPTSTEEGSPAGSPTSTEEGTSTEPSEGSAPGTSESATPESGPGTSESATPESGPGTSESATPESGPGSEPATSGSETPGSEPATSGSETPGSPAGSPTSTEEGTSTEPSEGSAPGTSTEPSEGSAPGSEPATSGSETPGTSESATPESGPGTSTEPSEGSAPGIVLSLDVPIGLLQILLEQARARAAREQATTNARILARVGHC

SEQ ID NO: 1482 - protein, 618 aa, Artificial Sequence
  Description of Artificial Sequence: Synthetic polypeptide
GSPAGSPTSTEEGTSESATPESGPGTSTEPSEGSAPGSPAGSPTSTEEGTSTEPSEGSAPGTSTEPSEGSAPGTSESATPESGPGSEPATSGSETPGSEPATSGSETPGSPAGSPTSTEEGTSESATPESGPGTSTEPSEGSAPGTSTEPSEGSAPGSPAGSPTSTEEGTSTEPSEGSAPGTSTEPSEGSAPGTSESATPESGPGTSTEPSEGSAPGTSESATPESGPGSEPATSGSETPGTSTEPSEGSAPGTSTEPSEGSAPGTSESATPESGPGTSESATPESGPGSPAGSPTSTEEGTSESATPESGPGSEPATSGSETPGTSESATPESGPGTSTEPSEGSAPGTSTEPSEGSAPGTSTEPSEGSAPGTSTEPSEGSAPGTSTEPSEGSAPGTSTEPSEGSAPGSPAGSPTSTEEGTSTEPSEGSAPGTSESATPESGPGSEPATSGSETPGTSESATPESGPGSEPATSGSETPGTSESATPESGPGTSTEPSEGSAPGTSESATPESGPGSPAGSPTSTEEGSPAGSPTSTEEGSPAGSPTSTEEGTSESATPESGPGTSTEPSEGSAPGIVLSLDVPIGLLQILLEQARARAAREQATTNARILARVGHC

SEQ ID NO: 1483 - protein, 618 aa, Artificial Sequence
  Description of Artificial Sequence: Synthetic polypeptide
GSTSSTAESPGPGSTSSTAESPGPGSTSESPSGTAPGSTSSTAESPGPGSTSSTAESPGPGTSTPESGSASPGSTSESPSGTAPGTSPSGESSTAPGSTSESPSGTAPGSTSESPSGTAPGTSPSGESSTAPGSTSESPSGTAPGSTSESPSGTAPGTSPSGESSTAPGSTSESPSGTAPGSTSESPSGTAPGSTSESPSGTAPGTSTPESGSASPGSTSESPSGTAPGTSTPESGSASPGSTSSTAESPGPGSTSSTAESPGPGTSTPESGSASPGTSTPESGSASPGSTSESPSGTAPGTSTPESGSASPGTSTPESGSASPGSTSESPSGTAPGSTSESPSGTAPGSTSESPSGTAPGSTSSTAESPGPGTSTPESGSASPGTSTPESGSASPGSTSESPSGTAPGSTSESPSGTAPGTSTPESGSASPGSTSESPSGTAPGSTSESPSGTAPGTSTPESGSASPGTSPSGESSTAPGSTSSTAESPGPGTSPSGESSTAPGSTSSTAESPGPGTSTPESGSASPGSTSESPSGTAPGSTSSTAESPGPGTSTPESGSASPGTSTPESGSASPGIVLSLDVPIGLLQILLEQARARAAREQATTNARILARVGHC

SEQ ID NO: 1484 - protein, 878 aa, Artificial Sequence
  Description of Artificial Sequence: Synthetic polypeptide
GSSESGSSEGGPGSSESGSSEGGPGESPGGSSGSESGSGGEPSESGSSGESPGGSSGSESGESPGGSSGSESGSSESGSSEGGPGSSESGSSEGGPGSSESGSSEGGPGESPGGSSGSESGESPGGSSGSESGESPGGSSGSESGSSESGSSEGGPGSSESGSSEGGPGSSESGSSEGGPGSSESGSSEGGPGSSESGSSEGGPGSSESGSSEGGPGSGGEPSESGSSGESPGGSSGSESGESPGGSSGSESGSGGEPSESGSSGSEGSSGPGESSGSSESGSSEGGPGSGGEPSESGSSGSEGSSGPGESSGSSESGSSEGGPGSGGEPSESGSSGESPGGSSGSESGSGGEPSESGSSGSGGEPSESGSSGSSESGSSEGGPGSGGEPSESGSSGSGGEPSESGSSGSEGSSGPGESSGESPGGSSGSESGSEGSSGPGESSGSEGSSGPGESSGSGGEPSESGSSGSSESGSSEGGPGSSESGSSEGGPGESPGGSSGSESGSGGEPSESGSSGSEGSSGPGESSGESPGGSSGSESGSEGSSGPGSSESGSSEGGPGSGGEPSESGSSGSEGSSGPGESSGSEGSSGPGESSGSEGSSGPGESSGSGGEPSESGSSGSGGEPSESGSSGESPGGSSGSESGESPGGSSGSESGSGGEPSESGSSGSEGSSGPGESSGESPGGSSGSESGSSESGSSEGGPGSSESGSSEGGPGSSESGSSEGGPGSGGEPSESGSSGSSESGSSEGGPGESPGGSSGSESGSGGEPSESGSSGSSESGSSEGGPGESPGGSSGSESGSGGEPSESGSSGESPGGSSGSESGSGGEPSESGSSGIVLSLDVPIGLLQILLEQARARAAREQATTNARILARVGHC

SEQ ID NO: 1485 - protein, 906 aa, Artificial Sequence
  Description of Artificial Sequence: Synthetic polypeptide
GSPAGSPTSTEEGTSESATPESGPGTSTEPSEGSAPGSPAGSPTSTEEGTSTEPSEGSAPGTSTEPSEGSAPGTSESATPESGPGSEPATSGSETPGSEPATSGSETPGSPAGSPTSTEEGTSESATPESGPGTSTEPSEGSAPGTSTEPSEGSAPGSPAGSPTSTEEGTSTEPSEGSAPGTSTEPSEGSAPGTSESATPESGPGTSTEPSEGSAPGTSESATPESGPGSEPATSGSETPGTSTEPSEGSAPGTSTEPSEGSAPGTSESATPESGPGTSESATPESGPGSPAGSPTSTEEGTSESATPESGPGSEPATSGSETPGTSESATPESGPGTSTEPSEGSAPGTSTEPSEGSAPGTSTEPSEGSAPGTSTEPSEGSAPGTSTEPSEGSAPGTSTEPSEGSAPGSPAGSPTSTEEGTSTEPSEGSAPGTSESATPESGPGSEPATSGSETPGTSESATPESGPGSEPATSGSETPGTSESATPESGPGTSTEPSEGSAPGTSESATPESGPGSPAGSPTSTEEGSPAGSPTSTEEGSPAGSPTSTEEGTSESATPESGPGTSTEPSEGSAPGTSESATPESGPGSEPATSGSETPGTSESATPESGPGSEPATSGSETPGTSESATPESGPGTSTEPSEGSAPGSPAGSPTSTEEGTSESATPESGPGSEPATSGSETPGTSESATPESGPGSPAGSPTSTEEGSPAGSPTSTEEGTSTEPSEGSAPGTSESATPESGPGTSESATPESGPGTSESATPESGPGSEPATSGSETPGSEPATSGSETPGSPAGSPTSTEEGTSTEPSEGSAPGTSTEPSEGSAPGSEPATSGSETPGTSESATPESGPGTSTEPSEGSAPGIVLSLDVPIGLLQILLEQARARAAREQATTNARILARVGHC

SEQ ID NO: 1486 - protein, 917 aa, Artificial Sequence
  Description of Artificial Sequence: Synthetic polypeptide
  MOD_RES (430)..(432): Any amino acid
  MOD_RES (443)..(446): Any amino acid
GSTSESPSGTAPGTSPSGESSTAPGSTSESPSGTAPGSTSESPSGTAPGTSTPESGSASPGTSTPESGSASPGSTSESPSGTAPGSTSESPSGTAPGTSPSGESSTAPGSTSESPSGTAPGTSPSGESSTAPGTSPSGESSTAPGSTSSTAESPGPGTSPSGESSTAPGTSPSGESSTAPGSTSSTAESPGPGTSTPESGSASPGTSTPESGSASPGSTSESPSGTAPGSTSESPSGTAPGTSTPESGSASPGSTSSTAESPGPGTSTPESGSASPGSTSESPSGTAPGTSPSGESSTAPGSTSSTAESPGPGTSPSGESSTAPGTSTPESGSASPGSTSSTAESPGPGSTSSTAESPGPGSTSSTAESPGPGSTSSTAESPGPGTSPSGESSTAPGSTSESPSGTAPGSTSESPSGTAPGTSTPESGPXXXGASASGAPSTXXXXSESPSGTAPGSTSESPSGTAPGSTSESPSGTAPGSTSESPSGTAPGSTSESPSGTAPGSTSESPSGTAPGTSTPESGSASPGTSPSGESSTAPGTSPSGESSTAPGSTSSTAESPGPGTSPSGESSTAPGTSTPESGSASPGSTSESPSGTAPGSTSESPSGTAPGTSPSGESSTAPGSTSESPSGTAPGTSTPESGSASPGTSTPESGSASPGSTSESPSGTAPGTSTPESGSASPGSTSSTAESPGPGSTSESPSGTAPGSTSESPSGTAPGTSPSGESSTAPGSTSSTAESPGPGTSPSGESSTAPGTSTPESGSASPGTSPSGESSTAPGTSPSGESSTAPGTSPSGESSTAPGSTSSTAESPGPGSTSSTAESPGPGTSPSGESSTAPGSSPSASTGTGPGSSTPSGATGSPGSSTPSGATGSPGIVLSLDVPIGLLQILLEQARARAAREQATTNARILARVGHC

SEQ ID NO: 1487 - protein, 906 aa, Artificial Sequence
  Description of Artificial Sequence: Synthetic polypeptide
GASPGTSSTGSPGSSPSASTGTGPGSSPSASTGTGPGTPGSGTASSSPGSSTPSGATGSPGSNPSASTGTGPGASPGTSSTGSPGTPGSGTASSSPGSSTPSGATGSPGTPGSGTASSSPGASPGTSSTGSPGASPGTSSTGSPGTPGSGTASSSPGSSTPSGATGSPGASPGTSSTGSPGTPGSGTASSSPGSSTPSGATGSPGSNPSASTGTGPGSSPSASTGTGPGSSTPSGATGSPGSSTPSGATGSPGASPGTSSTGSPGASPGTSSTGSPGASPGTSSTGSPGTPGSGTASSSPGASPGTSSTGSPGASPGTSSTGSPGASPGTSSTGSPGSSPSASTGTGPGTPGSGTASSSPGASPGTSSTGSPGASPGTSSTGSPGASPGTSSTGSPGSSTPSGATGSPGSSTPSGATGSPGASPGTSSTGSPGTPGSGTASSSPGSSTPSGATGSPGSSTPSGATGSPGSSTPSGATGSPGSSPSASTGTGPGASPGTSSTGSPGASPGTSSTGSPGTPGSGTASSSPGASPGTSSTGSPGASPGTSSTGSPGASPGTSSTGSPGASPGTSSTGSPGTPGSGTASSSPGSSTPSGATGSPGTPGSGTASSSPGSSTPSGATGSPGTPGSGTASSSPGSSTPSGATGSPGSSTPSGATGSPGSSPSASTGTGPGSSPSASTGTGPGASPGTSSTGSPGTPGSGTASSSPGSSTPSGATGSPGSSPSASTGTGPGSSPSASTGTGPGASPGTSSTGSPGASPGTSSTGSPGSSTPSGATGSPGSSPSASTGTGPGASPGTSSTGSPGSSPSASTGTGPGTPGSGTASSSPGSSTPSGATGSPGSSTPSGATGSPGASPGTSSTGSPGIVLSLDVPIGLLQILLEQARARAAREQATTNARILARVGHC

SEQ ID NO: 1488 - protein, 917 aa, Artificial Sequence
  Description of Artificial Sequence: Synthetic polypeptide
GTSTEPSEGSAPGSEPATSGSETPGSPAGSPTSTEEGSTSSTAESPGPGTSTPESGSASPGSTSESPSGTAPGSTSESPSGTAPGTSTPESGSASPGTSTPESGSASPGSEPATSGSETPGTSESATPESGPGSPAGSPTSTEEGTSTEPSEGSAPGTSESATPESGPGTSTEPSEGSAPGTSTEPSEGSAPGSPAGSPTSTEEGTSTEPSEGSAPGTSTEPSEGSAPGTSESATPESGPGTSESATPESGPGTSTEPSEGSAPGTSTEPSEGSAPGTSESATPESGPGTSTEPSEGSAPGSEPATSGSETPGSPAGSPTSTEEGSSTPSGATGSPGTPGSGTASSSPGSSTPSGATGSPGTSTEPSEGSAPGTSTEPSEGSAPGSEPATSGSETPGSPAGSPTSTEEGSPAGSPTSTEEGTSTEPSEGSAPGASASGAPSTGGTSESATPESGPGSPAGSPTSTEEGSPAGSPTSTEEGSTSSTAESPGPGSTSESPSGTAPGTSPSGESSTAPGTPGSGTASSSPGSSTPSGATGSPGSSPSASTGTGPGSEPATSGSETPGTSESATPESGPGSEPATSGSETPGSTSSTAESPGPGSTSSTAESPGPGTSPSGESSTAPGSEPATSGSETPGSEPATSGSETPGTSTEPSEGSAPGSTSSTAESPGPGTSTPESGSASPGSTSESPSGTAPGTSTEPSEGSAPGTSTEPSEGSAPGTSTEPSEGSAPGSSTPSGATGSPGSSPSASTGTGPGASPGTSSTGSPGSEPATSGSETPGTSESATPESGPGSPAGSPTSTEEGSSTPSGATGSPGSSPSASTGTGPGASPGTSSTGSPGTSESATPESGPGTSTEPSEGSAPGTSTEPSEGSAPGIVLSLDVPIGLLQILLEQARARAAREQATTNARILARVGHC

SEQ ID NO: 1489 - protein, 183 aa, Artificial Sequence
  Description of Artificial Sequence: Synthetic polypeptide
FTLSLDVPTNIMNLLFNIAKAKNLRAQAAANAHLMAQIGGSEPATSGSETPGTSESATPESGPGSEPATSGSETPGSPAGSPTSTEEGTSTEPSEGSAPGSEPATSGSETPGSEPATSGSETPGSEPATSGSETPGTSTEPSEGSAPGTSESATPESGPGSEPATSGSETPGTSTEPSEGSAP

SEQ ID NO: 1490 - protein, 183 aa, Artificial Sequence
  Description of Artificial Sequence: Synthetic polypeptide
FTLSLDVPTNIMNLLFNIAKAKNLRAQAAANAHLMAQIGGTSTPESGSASPGTSPSGESSTAPGTSPSGESSTAPGSTSSTAESPGPGSTSESPSGTAPGSTSSTAESPGPGTSPSGESSTAPGTSTPESGSASPGSTSSTAESPGPGTSPSGESSTAPGTSPSGESSTAPGTSPSGESSTAP

SEQ ID NO: 1491 - protein, 327 aa, Artificial Sequence
  Description of Artificial Sequence: Synthetic polypeptide
FTLSLDVPTNIMNLLFNIAKAKNLRAQAAANAHLMAQIGGTSESATPESGPGSEPATSGSETPGTSESATPESGPGSEPATSGSETPGTSESATPESGPGTSTEPSEGSAPGSPAGSPTSTEEGTSESATPESGPGSEPATSGSETPGTSESATPESGPGSPAGSPTSTEEGSPAGSPTSTEEGTSTEPSEGSAPGTSESATPESGPGTSESATPESGPGTSESATPESGPGSEPATSGSETPGSEPATSGSETPGSPAGSPTSTEEGTSTEPSEGSAPGTSTEPSEGSAPGSEPATSGSETPGTSESATPESGPGTSTEPSEGSAP

SEQ ID NO: 1492 - protein, 615 aa, Artificial Sequence
  Description of Artificial Sequence: Synthetic polypeptide
FTLSLDVPTNIMNLLFNIAKAKNLRAQAAANAHLMAQIGGSPAGSPTSTEEGTSESATPESGPGTSTEPSEGSAPGSPAGSPTSTEEGTSTEPSEGSAPGTSTEPSEGSAPGTSESATPESGPGSEPATSGSETPGSEPATSGSETPGSPAGSPTSTEEGTSESATPESGPGTSTEPSEGSAPGTSTEPSEGSAPGSPAGSPTSTEEGTSTEPSEGSAPGTSTEPSEGSAPGTSESATPESGPGTSTEPSEGSAPGTSESATPESGPGSEPATSGSETPGTSTEPSEGSAPGTSTEPSEGSAPGTSESATPESGPGTSESATPESGPGSPAGSPTSTEEGTSESATPESGPGSEPATSGSETPGTSESATPESGPGTSTEPSEGSAPGTSTEPSEGSAPGTSTEPSEGSAPGTSTEPSEGSAPGTSTEPSEGSAPGTSTEPSEGSAPGSPAGSPTSTEEGTSTEPSEGSAPGTSESATPESGPGSEPATSGSETPGTSESATPESGPGSEPATSGSETPGTSESATPESGPGTSTEPSEGSAPGTSESATPESGPGSPAGSPTSTEEGSPAGSPTSTEEGSPAGSPTSTEEGTSESATPESGPGTSTEPSEGSAP

SEQ ID NO: 1493 - protein, 615 aa, Artificial Sequence
  Description of Artificial Sequence: Synthetic polypeptide
FTLSLDVPTNIMNLLFNIAKAKNLRAQAAANAHLMAQIGGSTSSTAESPGPGSTSSTAESPGPGSTSESPSGTAPGSTSSTAESPGPGSTSSTAESPGPGTSTPESGSASPGSTSESPSGTAPGTSPSGESSTAPGSTSESPSGTAPGSTSESPSGTAPGTSPSGESSTAPGSTSESPSGTAPGSTSESPSGTAPGTSPSGESSTAPGSTSESPSGTAPGSTSESPSGTAPGSTSESPSGTAPGTSTPESGSASPGSTSESPSGTAPGTSTPESGSASPGSTSSTAESPGPGSTSSTAESPGPGTSTPESGSASPGTSTPESGSASPGSTSESPSGTAPGTSTPESGSASPGTSTPESGSASPGSTSESPSGTAPGSTSESPSGTAPGSTSESPSGTAPGSTSSTAESPGPGTSTPESGSASPGTSTPESGSASPGSTSESPSGTAPGSTSESPSGTAPGTSTPESGSASPGSTSESPSGTAPGSTSESPSGTAPGTSTPESGSASPGTSPSGESSTAPGSTSSTAESPGPGTSPSGESSTAPGSTSSTAESPGPGTSTPESGSASPGSTSESPSGTAPGSTSSTAESPGPGTSTPESGSASPGTSTPESGSASP

SEQ ID NO: 1494 - protein, 875 aa, Artificial Sequence
  Description of Artificial Sequence: Synthetic polypeptide
FTLSLDVPTNIMNLLFNIAKAKNLRAQAAANAHLMAQIGGSSESGSSEGGPGSSESGSSEGGPGESPGGSSGSESGSGGEPSESGSSGESPGGSSGSESGESPGGSSGSESGSSESGSSEGGPGSSESGSSEGGPGSSESGSSEGGPGESPGGSSGSESGESPGGSSGSESGESPGGSSGSESGSSESGSSEGGPGSSESGSSEGGPGSSESGSSEGGPGSSESGSSEGGPGSSESGSSEGGPGSSESGSSEGGPGSGGEPSESGSSGESPGGSSGSESGESPGGSSGSESGSGGEPSESGSSGSEGSSGPGESSGSSESGSSEGGPGSGGEPSESGSSGSEGSSGPGESSGSSESGSSEGGPGSGGEPSESGSSGESPGGSSGSESGSGGEPSESGSSGSGGEPSESGSSGSSESGSSEGGPGSGGEPSESGSSGSGGEPSESGSSGSEGSSGPGESSGESPGGSSGSESGSEGSSGPGESSGSEGSSGPGESSGSGGEPSESGSSGSSESGSSEGGPGSSESGSSEGGPGESPGGSSGSESGSGGEPSESGSSGSEGSSGPGESSGESPGGSSGSESGSEGSSGPGSSESGSSEGGPGSGGEPSESGSSGSEGSSGPGESSGSEGSSGPGESSGSEGSSGPGESSGSGGEPSESGSSGSGGEPSESGSSGESPGGSSGSESGESPGGSSGSESGSGGEPSESGSSGSEGSSGPGESSGESPGGSSGSESGSSESGSSEGGPGSSESGSSEGGPGSSESGSSEGGPGSGGEPSESGSSGSSESGSSEGGPGESPGGSSGSESGSGGEPSESGSSGSSESGSSEGGPGESPGGSSGSESGSGGEPSESGSSGESPGGSSGSESGSGGEPSESGSS

SEQ ID NO: 1495 - protein, 903 aa, Artificial Sequence
  Description of Artificial Sequence: Synthetic polypeptide
FTLSLDVPTNIMNLLFNIAKAKNLRAQAAANAHLMAQIGGSPAGSPTSTEEGTSESATPESGPGTSTEPSEGSAPGSPAGSPTSTEEGTSTEPSEGSAPGTSTEPSEGSAPGTSESATPESGPGSEPATSGSETPGSEPATSGSETPGSPAGSPTSTEEGTSESATPESGPGTSTEPSEGSAPGTSTEPSEGSAPGSPAGSPTSTEEGTSTEPSEGSAPGTSTEPSEGSAPGTSESATPESGPGTSTEPSEGSAPGTSESATPESGPGSEPATSGSETPGTSTEPSEGSAPGTSTEPSEGSAPGTSESATPESGPGTSESATPESGPGSPAGSPTSTEEGTSESATPESGPGSEPATSGSETPGTSESATPESGPGTSTEPSEGSAPGTSTEPSEGSAPGTSTEPSEGSAPGTSTEPSEGSAPGTSTEPSEGSAPGTSTEPSEGSAPGSPAGSPTSTEEGTSTEPSEGSAPGTSESATPESGPGSEPATSGSETPGTSESATPESGPGSEPATSGSETPGTSESATPESGPGTSTEPSEGSAPGTSESATPESGPGSPAGSPTSTEEGSPAGSPTSTEEGSPAGSPTSTEEGTSESATPESGPGTSTEPSEGSAPGTSESATPESGPGSEPATSGSETPGTSESATPESGPGSEPATSGSETPGTSESATPESGPGTSTEPSEGSAPGSPAGSPTSTEEGTSESATPESGPGSEPATSGSETPGTSESATPESGPGSPAGSPTSTEEGSPAGSPTSTEEGTSTEPSEGSAPGTSESATPESGPGTSESATPESGPGTSESATPESGPGSEPATSGSETPGSEPATSGSETPGSPAGSPTSTEEGTSTEPSEGSAPGTSTEPSEGSAPGSEPATSGSETPGTSESATPESGPGTSTEPSEGSAP

SEQ ID NO: 1496 - protein, 914 aa, Artificial Sequence
  Description of Artificial Sequence: Synthetic polypeptide
  MOD_RES (469)..(471): Any amino acid
  MOD_RES (482)..(485): Any amino acid
FTLSLDVPTNIMNLLFNIAKAKNLRAQAAANAHLMAQIGGSTSESPSGTAPGTSPSGESSTAPGSTSESPSGTAPGSTSESPSGTAPGTSTPESGSASPGTSTPESGSASPGSTSESPSGTAPGSTSESPSGTAPGTSPSGESSTAPGSTSESPSGTAPGTSPSGESSTAPGTSPSGESSTAPGSTSSTAESPGPGTSPSGESSTAPGTSPSGESSTAPGSTSSTAESPGPGTSTPESGSASPGTSTPESGSASPGSTSESPSGTAPGSTSESPSGTAPGTSTPESGSASPGSTSSTAESPGPGTSTPESGSASPGSTSESPSGTAPGTSPSGESSTAPGSTSSTAESPGPGTSPSGESSTAPGTSTPESGSASPGSTSSTAESPGPGSTSSTAESPGPGSTSSTAESPGPGSTSSTAESPGPGTSPSGESSTAPGSTSESPSGTAPGSTSESPSGTAPGTSTPESGPXXXGASASGAPSTXXXXSESPSGTAPGSTSESPSGTAPGSTSESPSGTAPGSTSESPSGTAPGSTSESPSGTAPGSTSESPSGTAPGTSTPESGSASPGTSPSGESSTAPGTSPSGESSTAPGSTSSTAESPGPGTSPSGESSTAPGTSTPESGSASPGSTSESPSGTAPGSTSESPSGTAPGTSPSGESSTAPGSTSESPSGTAPGTSTPESGSASPGTSTPESGSASPGSTSESPSGTAPGTSTPESGSASPGSTSSTAESPGPGSTSESPSGTAPGSTSESPSGTAPGTSPSGESSTAPGSTSSTAESPGPGTSPSGESSTAPGTSTPESGSASPGTSPSGESSTAPGTSPSGESSTAPGTSPSGESSTAPGSTSSTAESPGPGSTSSTAESPGPGTSPSGESSTAPGSSPSASTGTGPGSSTPSGATGSPGSSTPSGATGSP

SEQ ID NO: 1497 - protein, 903 aa, Artificial Sequence
  Description of Artificial Sequence: Synthetic polypeptide
FTLSLDVPTNIMNLLFNIAKAKNLRAQAAANAHLMAQIGGASPGTSSTGSPGSSPSASTGTGPGSSPSASTGTGPGTPGSGTASSSPGSSTPSGATGSPGSNPSASTGTGPGASPGTSSTGSPGTPGSGTASSSPGSSTPSGATGSPGTPGSGTASSSPGASPGTSSTGSPGASPGTSSTGSPGTPGSGTASSSPGSSTPSGATGSPGASPGTSSTGSPGTPGSGTASSSPGSSTPSGATGSPGSNPSASTGTGPGSSPSASTGTGPGSSTPSGATGSPGSSTPSGATGSPGASPGTSSTGSPGASPGTSSTGSPGASPGTSSTGSPGTPGSGTASSSPGASPGTSSTGSPGASPGTSSTGSPGASPGTSSTGSPGSSPSASTGTGPGTPGSGTASSSPGASPGTSSTGSPGASPGTSSTGSPGASPGTSSTGSPGSSTPSGATGSPGSSTPSGATGSPGASPGTSSTGSPGTPGSGTASSSPGSSTPSGATGSPGSSTPSGATGSPGSSTPSGATGSPGSSPSASTGTGPGASPGTSSTGSPGASPGTSSTGSPGTPGSGTASSSPGASPGTSSTGSPGASPGTSSTGSPGASPGTSSTGSPGASPGTSSTGSPGTPGSGTASSSPGSSTPSGATGSPGTPGSGTASSSPGSSTPSGATGSPGTPGSGTASSSPGSSTPSGATGSPGSSTPSGATGSPGSSPSASTGTGPGSSPSASTGTGPGASPGTSSTGSPGTPGSGTASSSPGSSTPSGATGSPGSSPSASTGTGPGSSPSASTGTGPGASPGTSSTGSPGASPGTSSTGSPGSSTPSGATGSPGSSPSASTGTGPGASPGTSSTGSPGSSPSASTGTGPGTPGSGTASSSPGSSTPSGATGSPGSSTPSGATGSPGASPGTSSTGSP

SEQ ID NO: 1498 - protein, 914 aa, Artificial Sequence
  Description of Artificial Sequence: Synthetic polypeptide
FTLSLDVPTNIMNLLFNIAKAKNLRAQAAANAHLMAQIGGTSTEPSEGSAPGSEPATSGSETPGSPAGSPTSTEEGSTSSTAESPGPGTSTPESGSASPGSTSESPSGTAPGSTSESPSGTAPGTSTPESGSASPGTSTPESGSASPGSEPATSGSETPGTSESATPESGPGSPAGSPTSTEEGTSTEPSEGSAPGTSESATPESGPGTSTEPSEGSAPGTSTEPSEGSAPGSPAGSPTSTEEGTSTEPSEGSAPGTSTEPSEGSAPGTSESATPESGPGTSESATPESGPGTSTEPSEGSAPGTSTEPSEGSAPGTSESATPESGPGTSTEPSEGSAPGSEPATSGSETPGSPAGSPTSTEEGSSTPSGATGSPGTPGSGTASSSPGSSTPSGATGSPGTSTEPSEGSAPGTSTEPSEGSAPGSEPATSGSETPGSPAGSPTSTEEGSPAGSPTSTEEGTSTEPSEGSAPGASASGAPSTGGTSESATPESGPGSPAGSPTSTEEGSPAGSPTSTEEGSTSSTAESPGPGSTSESPSGTAPGTSPSGESSTAPGTPGSGTASSSPGSSTPSGATGSPGSSPSASTGTGPGSEPATSGSETPGTSESATPESGPGSEPATSGSETPGSTSSTAESPGPGSTSSTAESPGPGTSPSGESSTAPGSEPATSGSETPGSEPATSGSETPGTSTEPSEGSAPGSTSSTAESPGPGTSTPESGSASPGSTSESPSGTAPGTSTEPSEGSAPGTSTEPSEGSAPGTSTEPSEGSAPGSSTPSGATGSPGSSPSASTGTGPGASPGTSSTGSPGSEPATSGSETPGTSESATPESGPGSPAGSPTSTEEGSSTPSGATGSPGSSPSASTGTGPGASPGTSSTGSPGTSESATPESGPGTSTEPSEGSAPGTSTEPSEGSAP

SEQ ID NO: 1499 - protein, 1357 aa, Artificial Sequence
  Description of Artificial Sequence: Synthetic polypeptide
FTLSLDVPTNIMNLLFNIAKAKNLRAQAAANAHLMAQIGGTSTEPSEGSAPGSEPATSGSETPGSPAGSPTSTEEGSTSSTAESPGPGTSTPESGSASPGSTSESPSGTAPGSTSESPSGTAPGTSTPESGSASPGTSTPESGSASPGSEPATSGSETPGTSESATPESGPGSPAGSPTSTEEGTSTEPSEGSAPGTSESATPESGPGTSTEPSEGSAPGTSTEPSEGSAPGSPAGSPTSTEEGTSTEPSEGSAPGTSTEPSEGSAPGTSESATPESGPGTSESATPESGPGTSTEPSEGSAPGTSTEPSEGSAPGTSESATPESGPGTSTEPSEGSAPGSEPATSGSETPGSPAGSPTSTEEGSSTPSGATGSPGTPGSGTASSSPGSSTPSGATGSPGTSTEPSEGSAPGTSTEPSEGSAPGSEPATSGSETPGSPAGSPTSTEEGSPAGSPTSTEEGTSTEPSEGSAPGPEPTGPAPSGGSEPATSGSETPGTSESATPESGPGSPAGSPTSTEEGTSESATPESGPGSPAGSPTSTEEGSPAGSPTSTEEGTSESATPESGPGSPAGSPTSTEEGSPAGSPTSTEEGSTSSTAESPGPGSTSESPSGTAPGTSPSGESSTAPGSTSESPSGTAPGSTSESPSGTAPGTSPSGESSTAPGTSTEPSEGSAPGTSESATPESGPGTSESATPESGPGSEPATSGSETPGTSESATPESGPGTSESATPESGPGTSTEPSEGSAPGTSESATPESGPGTSTEPSEGSAPGTSPSGESSTAPGTSPSGESSTAPGTSPSGESSTAPGTSTEPSEGSAPGSPAGSPTSTEEGTSTEPSEGSAPGSSPSASTGTGPGSSTPSGATGSPGSSTPSGATGSPGSSTPSGATGSPGSSTPSGATGSPGASPGTSSTGSPGASASGAPSTGGTSPSGESSTAPGSTSSTAESPGPGTSPSGESSTAPGTSESATPESGPGTSTEPSEGSAPGTSTEPSEGSAPGSSPSASTGTGPGSSTPSGATGSPGASPGTSSTGSPGTSTPESGSASPGTSPSGESSTAPGTSPSGESSTAPGTSESATPESGPGSEPATSGSETPGTSTEPSEGSAPGSTSESPSGTAPGSTSESPSGTAPGTSTPESGSASPGSPAGSPTSTEEGTSESATPESGPGTSTEPSEGSAPGSPAGSPTSTEEGTSESATPESGPGSEPATSGSETPGSSTPSGATGSPGASPGTSSTGSPGSSTPSGATGSPGSTSESPSGTAPGTSPSGESSTAPGSTSSTAESPGPGSSTPSGATGSPGASPGTSSTGSPGTPGSGTASSSPGSPAGSPTSTEEGSPAGSPTSTEEGTSTEPSEGSAP

SEQ ID NO: 1500 - protein, 952 aa, Artificial Sequence
  Description of Artificial Sequence: Synthetic polypeptide
MAEPAGSPTSTEEGTPGSGTASSSPGSSTPSGATGSPGASPGTSSTGSPGSPAGSPTSTEEGTSESATPESGPGTSTEPSEGSAPGSPAGSPTSTEEGTSTEPSEGSAPGTSTEPSEGSAPGTSESATPESGPGSEPATSGSETPGSEPATSGSETPGSPAGSPTSTEEGTSESATPESGPGTSTEPSEGSAPGTSTEPSEGSAPGSPAGSPTSTEEGTSTEPSEGSAPGTSTEPSEGSAPGTSESATPESGPGTSTEPSEGSAPGTSESATPESGPGSEPATSGSETPGTSTEPSEGSAPGTSTEPSEGSAPGTSESATPESGPGTSESATPESGPGSPAGSPTSTEEGTSESATPESGPGSEPATSGSETPGTSESATPESGPGTSTEPSEGSAPGTSTEPSEGSAPGTSTEPSEGSAPGTSTEPSEGSAPGTSTEPSEGSAPGTSTEPSEGSAPGSPAGSPTSTEEGTSTEPSEGSAPGTSESATPESGPGSEPATSGSETPGTSESATPESGPGSEPATSGSETPGTSESATPESGPGTSTEPSEGSAPGTSESATPESGPGSPAGSPTSTEEGSPAGSPTSTEEGSPAGSPTSTEEGTSESATPESGPGTSTEPSEGSAPGTSESATPESGPGSEPATSGSETPGTSESATPESGPGSEPATSGSETPGTSESATPESGPGTSTEPSEGSAPGSPAGSPTSTEEGTSESATPESGPGSEPATSGSETPGTSESATPESGPGSPAGSPTSTEEGSPAGSPTSTEEGTSTEPSEGSAPGTSESATPESGPGTSESATPESGPGTSESATPESGPGSEPATSGSETPGSEPATSGSETPGSPAGSPTSTEEGTSTEPSEGSAPGTSTEPSEGSAPGSEPATSGSETPGTSESATPESGPGTSTEPSEGSAPGFTLSLDVPTNIMNLLFNIAKAKNLRAQAAANAHLMAQI

SEQ ID NO: 1501 - protein, 963 aa, Artificial Sequence
  Description of Artificial Sequence: Synthetic polypeptide
MAEPAGSPTSTEEGASPGTSSTGSPGSSTPSGATGSPGSSTPSGATGSPGTSTEPSEGSAPGSEPATSGSETPGSPAGSPTSTEEGSTSSTAESPGPGTSTPESGSASPGSTSESPSGTAPGSTSESPSGTAPGTSTPESGSASPGTSTPESGSASPGSEPATSGSETPGTSESATPESGPGSPAGSPTSTEEGTSTEPSEGSAPGTSESATPESGPGTSTEPSEGSAPGTSTEPSEGSAPGSPAGSPTSTEEGTSTEPSEGSAPGTSTEPSEGSAPGTSESATPESGPGTSESATPESGPGTSTEPSEGSAPGTSTEPSEGSAPGTSESATPESGPGTSTEPSEGSAPGSEPATSGSETPGSPAGSPTSTEEGSSTPSGATGSPGTPGSGTASSSPGSSTPSGATGSPGTSTEPSEGSAPGTSTEPSEGSAPGSEPATSGSETPGSPAGSPTSTEEGSPAGSPTSTEEGTSTEPSEGSAPGASASGAPSTGGTSESATPESGPGSPAGSPTSTEEGSPAGSPTSTEEGSTSSTAESPGPGSTSESPSGTAPGTSPSGESSTAPGTPGSGTASSSPGSSTPSGATGSPGSSPSASTGTGPGSEPATSGSETPGTSESATPESGPGSEPATSGSETPGSTSSTAESPGPGSTSSTAESPGPGTSPSGESSTAPGSEPATSGSETPGSEPATSGSETPGTSTEPSEGSAPGSTSSTAESPGPGTSTPESGSASPGSTSESPSGTAPGTSTEPSEGSAPGTSTEPSEGSAPGTSTEPSEGSAPGSSTPSGATGSPGSSPSASTGTGPGASPGTSSTGSPGSEPATSGSETPGTSESATPESGPGSPAGSPTSTEEGSSTPSGATGSPGSSPSASTGTGPGASPGTSSTGSPGTSESATPESGPGTSTEPSEGSAPGTSTEPSEGSAPGFTLSLDVPTNIMNLLFNIAKAKNLRAQAAANAHLMAQI

SEQ ID NO: 1502 - protein, 183 aa, Artificial Sequence
  Description of Artificial Sequence: Synthetic polypeptide
GSEPATSGSETPGTSESATPESGPGSEPATSGSETPGSPAGSPTSTEEGTSTEPSEGSAPGSEPATSGSETPGSEPATSGSETPGSEPATSGSETPGTSTEPSEGSAPGTSESATPESGPGSEPATSGSETPGTSTEPSEGSAPGFTLSLDVPTNIMNLLFNIAKAKNLRAQAAANAHLMAQI

SEQ ID NO: 1503 - protein, 183 aa, Artificial Sequence
  Description of Artificial Sequence: Synthetic polypeptide
GTSTPESGSASPGTSPSGESSTAPGTSPSGESSTAPGSTSSTAESPGPGSTSESPSGTAPGSTSSTAESPGPGTSPSGESSTAPGTSTPESGSASPGSTSSTAESPGPGTSPSGESSTAPGTSPSGESSTAPGTSPSGESSTAPGFTLSLDVPTNIMNLLFNIAKAKNLRAQAAANAHLMAQI

SEQ ID NO: 1504 - protein, 327 aa, Artificial Sequence
  Description of Artificial Sequence: Synthetic polypeptide
GTSESATPESGPGSEPATSGSETPGTSESATPESGPGSEPATSGSETPGTSESATPESGPGTSTEPSEGSAPGSPAGSPTSTEEGTSESATPESGPGSEPATSGSETPGTSESATPESGPGSPAGSPTSTEEGSPAGSPTSTEEGTSTEPSEGSAPGTSESATPESGPGTSESATPESGPGTSESATPESGPGSEPATSGSETPGSEPATSGSETPGSPAGSPTSTEEGTSTEPSEGSAPGTSTEPSEGSAPGSEPATSGSETPGTSESATPESGPGTSTEPSEGSAPGFTLSLDVPTNIMNLLFNIAKAKNLRAQAAANAHLMAQI

SEQ ID NO: 1505 - protein, 615 aa, Artificial Sequence
  Description of Artificial Sequence: Synthetic polypeptide
GSPAGSPTSTEEGTSESATPESGPGTSTEPSEGSAPGSPAGSPTSTEEGTSTEPSEGSAPGTSTEPSEGSAPGTSESATPESGPGSEPATSGSETPGSEPATSGSETPGSPAGSPTSTEEGTSESATPESGPGTSTEPSEGSAPGTSTEPSEGSAPGSPAGSPTSTEEGTSTEPSEGSAPGTSTEPSEGSAPGTSESATPESGPGTSTEPSEGSAPGTSESATPESGPGSEPATSGSETPGTSTEPSEGSAPGTSTEPSEGSAPGTSESATPESGPGTSESATPESGPGSPAGSPTSTEEGTSESATPESGPGSEPATSGSETPGTSESATPESGPGTSTEPSEGSAPGTSTEPSEGSAPGTSTEPSEGSAPGTSTEPSEGSAPGTSTEPSEGSAPGTSTEPSEGSAPGSPAGSPTSTEEGTSTEPSEGSAPGTSESATPESGPGSEPATSGSETPGTSESATPESGPGSEPATSGSETPGTSESATPESGPGTSTEPSEGSAPGTSESATPESGPGSPAGSPTSTEEGSPAGSPTSTEEGSPAGSPTSTEEGTSESATPESGPGTSTEPSEGSAPGFTLSLDVPTNIMNLLFNIAKAKNLRAQAAANAHLMAQI

SEQ ID NO: 1506 - protein, 615 aa, Artificial Sequence
  Description of Artificial Sequence: Synthetic polypeptide
GSTSSTAESPGPGSTSSTAESPGPGSTSESPSGTAPGSTSSTAESPGPGSTSSTAESPGPGTSTPESGSASPGSTSESPSGTAPGTSPSGESSTAPGSTSESPSGTAPGSTSESPSGTAPGTSPSGESSTAPGSTSESPSGTAPGSTSESPSGTAPGTSPSGESSTAPGSTSESPSGTAPGSTSESPSGTAPGSTSESPSGTAPGTSTPESGSASPGSTSESPSGTAPGTSTPESGSASPGSTSSTAESPGPGSTSSTAESPGPGTSTPESGSASPGTSTPESGSASPGSTSESPSGTAPGTSTPESGSASPGTSTPESGSASPGSTSESPSGTAPGSTSESPSGTAPGSTSESPSGTAPGSTSSTAESPGPGTSTPESGSASPGTSTPESGSASPGSTSESPSGTAPGSTSESPSGTAPGTSTPESGSASPGSTSESPSGTAPGSTSESPSGTAPGTSTPESGSASPGTSPSGESSTAPGSTSSTAESPGPGTSPSGESSTAPGSTSSTAESPGPGTSTPESGSASPGSTSESPSGTAPGSTSSTAESPGPGTSTPESGSASPGTSTPESGSASPGFTLSLDVPTNIMNLLFNIAKAKNLRAQAAANAHLMAQI

SEQ ID NO: 1507 - protein, 875 aa, Artificial Sequence
  Description of Artificial Sequence: Synthetic polypeptide
GSSESGSSEGGPGSSESGSSEGGPGESPGGSSGSESGSGGEPSESGSSGESPGGSSGSESGESPGGSSGSESGSSESGSSEGGPGSSESGSSEGGPGSSESGSSEGGPGESPGGSSGSESGESPGGSSGSESGESPGGSSGSESGSSESGSSEGGPGSSESGSSEGGPGSSESGSSEGGPGSSESGSSEGGPGSSESGSSEGGPGSSESGSSEGGPGSGGEPSESGSSGESPGGSSGSESGESPGGSSGSESGSGGEPSESGSSGSEGSSGPGESSGSSESGSSEGGPGSGGEPSESGSSGSEGSSGPGESSGSSESGSSEGGPGSGGEPSESGSSGESPGGSSGSESGSGGEPSESGSSGSGGEPSESGSSGSSESGSSEGGPGSGGEPSESGSSGSGGEPSESGSSGSEGSSGPGESSGESPGGSSGSESGSEGSSGPGESSGSEGSSGPGESSGSGGEPSESGSSGSSESGSSEGGPGSSESGSSEGGPGESPGGSSGSESGSGGEPSESGSSGSEGSSGPGESSGESPGGSSGSESGSEGSSGPGSSESGSSEGGPGSGGEPSESGSSGSEGSSGPGESSGSEGSSGPGESSGSEGSSGPGESSGSGGEPSESGSSGSGGEPSESGSSGESPGGSSGSESGESPGGSSGSESGSGGEPSESGSSGSEGSSGPGESSGESPGGSSGSESGSSESGSSEGGPGSSESGSSEGGPGSSESGSSEGGPGSGGEPSESGSSGSSESGSSEGGPGESPGGSSGSESGSGGEPSESGSSGSSESGSSEGGPGESPGGSSGSESGSGGEPSESGSSGESPGGSSGSESGSGGEPSESGSSGFTLSLDVPTNIMNLLFNIAKAKNLRAQAAANAHLMAQI

SEQ ID NO: 1508 - protein, 903 aa, Artificial Sequence
  Description of Artificial Sequence: Synthetic polypeptide
GSPAGSPTSTEEGTSESATPESGPGTSTEPSEGSAPGSPAGSPTSTEEGTSTEPSEGSAPGTSTEPSEGSAPGTSESATPESGPGSEPATSGSETPGSEPATSGSETPGSPAGSPTSTEEGTSESATPESGPGTSTEPSEGSAPGTSTEPSEGSAPGSPAGSPTSTEEGTSTEPSEGSAPGTSTEPSEGSAPGTSESATPESGPGTSTEPSEGSAPGTSESATPESGPGSEPATSGSETPGTSTEPSEGSAPGTSTEPSEGSAPGTSESATPESGPGTSESATPESGPGSPAGSPTSTEEGTSESATPESGPGSEPATSGSETPGTSESATPESGPGTSTEPSEGSAPGTSTEPSEGSAPGTSTEPSEGSAPGTSTEPSEGSAPGTSTEPSEGSAPGTSTEPSEGSAPGSPAGSPTSTEEGTSTEPSEGSAPGTSESATPESGPGSEPATSGSETPGTSESATPESGPGSEPATSGSETPGTSESATPESGPGTSTEPSEGSAPGTSESATPESGPGSPAGSPTSTEEGSPAGSPTSTEEGSPAGSPTSTEEGTSESATPESGPGTSTEPSEGSAPGTSESATPESGPGSEPATSGSETPGTSESATPESGPGSEPATSGSETPGTSESATPESGPGTSTEPSEGSAPGSPAGSPTSTEEGTSESATPESGPGSEPATSGSETPGTSESATPESGPGSPAGSPTSTEEGSPAGSPTSTEEGTSTEPSEGSAPGTSESATPESGPGTSESATPESGPGTSESATPESGPGSEPATSGSETPGSEPATSGSETPGSPAGSPTSTEEGTSTEPSEGSAPGTSTEPSEGSAPGSEPATSGSETPGTSESATPESGPGTSTEPSEGSAPGFTLSLDVPTNIMNLLFNIAKAKNLRAQAAANAHLMAQI

SEQ ID NO: 1509 - protein, 914 aa, Artificial Sequence
  Description of Artificial Sequence: Synthetic polypeptide
  MOD_RES (430)..(432): Any amino acid
  MOD_RES (443)..(446): Any amino acid
GSTSESPSGTAPGTSPSGESSTAPGSTSESPSGTAPGSTSESPSGTAPGTSTPESGSASPGTSTPESGSASPGSTSESPSGTAPGSTSESPSGTAPGTSPSGESSTAPGSTSESPSGTAPGTSPSGESSTAPGTSPSGESSTAPGSTSSTAESPGPGTSPSGESSTAPGTSPSGESSTAPGSTSSTAESPGPGTSTPESGSASPGTSTPESGSASPGSTSESPSGTAPGSTSESPSGTAPGTSTPESGSASPGSTSSTAESPGPGTSTPESGSASPGSTSESPSGTAPGTSPSGESSTAPGSTSSTAESPGPGTSPSGESSTAPGTSTPESGSASPGSTSSTAESPGPGSTSSTAESPGPGSTSSTAESPGPGSTSSTAESPGPGTSPSGESSTAPGSTSESPSGTAPGSTSESPSGTAPGTSTPESGPXXXGASASGAPSTXXXXSESPSGTAPGSTSESPSGTAPGSTSESPSGTAPGSTSESPSGTAPGSTSESPSGTAPGSTSESPSGTAPGTSTPESGSASPGTSPSGESSTAPGTSPSGESSTAPGSTSSTAESPGPGTSPSGESSTAPGTSTPESGSASPGSTSESPSGTAPGSTSESPSGTAPGTSPSGESSTAPGSTSESPSGTAPGTSTPESGSASPGTSTPESGSASPGSTSESPSGTAPGTSTPESGSASPGSTSSTAESPGPGSTSESPSGTAPGSTSESPSGTAPGTSPSGESSTAPGSTSSTAESPGPGTSPSGESSTAPGTSTPESGSASPGTSPSGESSTAPGTSPSGESSTAPGTSPSGESSTAPGSTSSTAESPGPGSTSSTAESPGPGTSPSGESSTAPGSSPSASTGTGPGSSTPSGATGSPGSSTPSGATGSPGFTLSLDVPTNIMNLLFNIAKAKNLRAQAAANAHLMAQI

SEQ ID NO: 1510 - protein, 903 aa, Artificial Sequence
  Description of Artificial Sequence: Synthetic polypeptide
GASPGTSSTGSPGSSPSASTGTGPGSSPSASTGTGPGTPGSGTASSSPGSSTPSGATGSPGSNPSASTGTGPGASPGTSSTGSPGTPGSGTASSSPGSSTPSGATGSPGTPGSGTASSSPGASPGTSSTGSPGASPGTSSTGSPGTPGSGTASSSPGSSTPSGATGSPGASPGTSSTGSPGTPGSGTASSSPGSSTPSGATGSPGSNPSASTGTGPGSSPSASTGTGPGSSTPSGATGSPGSSTPSGATGSPGASPGTSSTGSPGASPGTSSTGSPGASPGTSSTGSPGTPGSGTASSSPGASPGTSSTGSPGASPGTSSTGSPGASPGTSSTGSPGSSPSASTGTGPGTPGSGTASSSPGASPGTSSTGSPGASPGTSSTGSPGASPGTSSTGSPGSSTPSGATGSPGSSTPSGATGSPGASPGTSSTGSPGTPGSGTASSSPGSSTPSGATGSPGSSTPSGATGSPGSSTPSGATGSPGSSPSASTGTGPGASPGTSSTGSPGASPGTSSTGSPGTPGSGTASSSPGASPGTSSTGSPGASPGTSSTGSPGASPGTSSTGSPGASPGTSSTGSPGTPGSGTASSSPGSSTPSGATGSPGTPGSGTASSSPGSSTPSGATGSPGTPGSGTASSSPGSSTPSGATGSPGSSTPSGATGSPGSSPSASTGTGPGSSPSASTGTGPGASPGTSSTGSPGTPGSGTASSSPGSSTPSGATGSPGSSPSASTGTGPGSSPSASTGTGPGASPGTSSTGSPGASPGTSSTGSPGSSTPSGATGSPGSSPSASTGTGPGASPGTSSTGSPGSSPSASTGTGPGTPGSGTASSSPGSSTPSGATGSPGSSTPSGATGSPGASPGTSSTGSPGFTLSLDVPTNIMNLLFNIAKAKNLRAQAAANAHLMAQI

SEQ ID NO: 1511 - protein, 914 aa, Artificial Sequence
  Description of Artificial Sequence: Synthetic polypeptide
GTSTEPSEGSAPGSEPATSGSETPGSPAGSPTSTEEGSTSSTAESPGPGTSTPESGSASPGSTSESPSGTAPGSTSESPSGTAPGTSTPESGSASPGTSTPESGSASPGSEPATSGSETPGTSESATPESGPGSPAGSPTSTEEGTSTEPSEGSAPGTSESATPESGPGTSTEPSEGSAPGTSTEPSEGSAPGSPAGSPTSTEEGTSTEPSEGSAPGTSTEPSEGSAPGTSESATPESGPGTSESATPESGPGTSTEPSEGSAPGTSTEPSEGSAPGTSESATPESGPGTSTEPSEGSAPGSEPATSGSETPGSPAGSPTSTEEGSSTPSGATGSPGTPGSGTASSSPGSSTPSGATGSPGTSTEPSEGSAPGTSTEPSEGSAPGSEPATSGSETPGSPAGSPTSTEEGSPAGSPTSTEEGTSTEPSEGSAPGASASGAPSTGGTSESATPESGPGSPAGSPTSTEEGSPAGSPTSTEEGSTSSTAESPGPGSTSESPSGTAPGTSPSGESSTAPGTPGSGTASSSPGSSTPSGATGSPGSSPSASTGTGPGSEPATSGSETPGTSESATPESGPGSEPATSGSETPGSTSSTAESPGPGSTSSTAESPGPGTSPSGESSTAPGSEPATSGSETPGSEPATSGSETPGTSTEPSEGSAPGSTSSTAESPGPGTSTPESGSASPGSTSESPSGTAPGTSTEPSEGSAPGTSTEPSEGSAPGTSTEPSEGSAPGSSTPSGATGSPGSSPSASTGTGPGASPGTSSTGSPGSEPATSGSETPGTSESATPESGPGSPAGSPTSTEEGSSTPSGATGSPGSSPSASTGTGPGASPGTSSTGSPGTSESATPESGPGTSTEPSEGSAPGTSTEPSEGSAPGFTLSLDVPTNIMNLLFNIAKAKNLRAQAAANAHLMAQI

SEQ ID NO: 1512 - protein, 1357 aa, Artificial Sequence
  Description of Artificial Sequence: Synthetic polypeptide
GTSTEPSEGSAPGSEPATSGSETPGSPAGSPTSTEEGSTSSTAESPGPGTSTPESGSASPGSTSESPSGTAPGSTSESPSGTAPGTSTPESGSASPGTSTPESGSASPGSEPATSGSETPGTSESATPESGPGSPAGSPTSTEEGTSTEPSEGSAPGTSESATPESGPGTSTEPSEGSAPGTSTEPSEGSAPGSPAGSPTSTEEGTSTEPSEGSAPGTSTEPSEGSAPGTSESATPESGPGTSESATPESGPGTSTEPSEGSAPGTSTEPSEGSAPGTSESATPESGPGTSTEPSEGSAPGSEPATSGSETPGSPAGSPTSTEEGSSTPSGATGSPGTPGSGTASSSPGSSTPSGATGSPGTSTEPSEGSAPGTSTEPSEGSAPGSEPATSGSETPGSPAGSPTSTEEGSPAGSPTSTEEGTSTEPSEGSAPGPEPTGPAPSGGSEPATSGSETPGTSESATPESGPGSPAGSPTSTEEGTSESATPESGPGSPAGSPTSTEEGSPAGSPTSTEEGTSESATPESGPGSPAGSPTSTEEGSPAGSPTSTEEGSTSSTAESPGPGSTSESPSGTAPGTSPSGESSTAPGSTSESPSGTAPGSTSESPSGTAPGTSPSGESSTAPGTSTEPSEGSAPGTSESATPESGPGTSESATPESGPGSEPATSGSETPGTSESATPESGPGTSESATPESGPGTSTEPSEGSAPGTSESATPESGPGTSTEPSEGSAPGTSPSGESSTAPGTSPSGESSTAPGTSPSGESSTAPGTSTEPSEGSAPGSPAGSPTSTEEGTSTEPSEGSAPGSSPSASTGTGPGSSTPSGATGSPGSSTPSGATGSPGSSTPSGATGSPGSSTPSGATGSPGASPGTSSTGSPGASASGAPSTGGTSPSGESSTAPGSTSSTAESPGPGTSPSGESSTAPGTSESATPESGPGTSTEPSEGSAPGTSTEPSEGSAPGSSPSASTGTGPGSSTPSGATGSPGASPGTSSTGSPGTSTPESGSASPGTSPSGESSTAPGTSPSGESSTAPGTSESATPESGPGSEPATSGSETPGTSTEPSEGSAPGSTSESPSGTAPGSTSESPSGTAPGTSTPESGSASPGSPAGSPTSTEEGTSESATPESGPGTSTEPSEGSAPGSPAGSPTSTEEGTSESATPESGPGSEPATSGSETPGSSTPSGATGSPGASPGTSSTGSPGSSTPSGATGSPGSTSESPSGTAPGTSPSGESSTAPGSTSSTAESPGPGSSTPSGATGSPGASPGTSSTGSPGTPGSGTASSSPGSPAGSPTSTEEGSPAGSPTSTEEGTSTEPSEGSAPGFTLSLDVPTNIMNLLFNIAKAKNLRAQAAANAHLMAQI

SEQ ID NO: 1513 - protein, 768 aa, Artificial Sequence
  Description of Artificial Sequence: Synthetic polypeptide
KCNTATCATQRLANFLVHSSNNFGAILSSTNVGSNTYGGSPAGSPTSTEEGTSESATPESGPGTSTEPSEGSAPGSPAGSPTSTEEGTSTEPSEGSAPGTSTEPSEGSAPGTSESATPESGPGSEPATSGSETPGSEPATSGSETPGSPAGSPTSTEEGTSESATPESGPGTSTEPSEGSAPGTSTEPSEGSAPGSPAGSPTSTEEGTSTEPSEGSAPGTSTEPSEGSAPGTSESATPESGPGTSTEPSEGSAPGTSESATPESGPGSEPATSGSETPGTSTEPSEGSAPGTSTEPSEGSAPGTSESATPESGPGTSESATPESGPGSPAGSPTSTEEGTSESATPESGPGSEPATSGSETPGTSESATPESGPGTSTEPSEGSAPGTSTEPSEGSAPGTSTEPSEGSAPGTSTEPSEGSAPGTSTEPSEGSAPGTSTEPSEGSAPGSPAGSPTSTEEGTSTEPSEGSAPGTSESATPESGPGSEPATSGSETPGTSESATPESGPGSEPATSGSETPGTSESATPESGPGTSTEPSEGSAPGTSESATPESGPGSPAGSPTSTEEGSPAGSPTSTEEGSPAGSPTSTEEGTSESATPESGPGTSTEPSEGSAPGMRPSGRKSSKMQAFRIWDVNQKTFYLRNNQLVAGYLQGPNVNLEEKIDVVPIEPHALFLGIHGGKMCLSCVKSGDETRLQLEAVNITDLSENRKQDKRFAFIRSDSGPTTSFESAACPGWFLCTAMEADQPVSLTNMPDEGVMVTKFYFQEDE

SEQ ID NO: 1514 - protein, 1056 aa, Artificial Sequence
  Description of Artificial Sequence: Synthetic polypeptide
KCNTATCATQRLANFLVHSSNNFGAILSSTNVGSNTYGGSPAGSPTSTEEGTSESATPESGPGTSTEPSEGSAPGSPAGSPTSTEEGTSTEPSEGSAPGTSTEPSEGSAPGTSESATPESGPGSEPATSGSETPGSEPATSGSETPGSPAGSPTSTEEGTSESATPESGPGTSTEPSEGSAPGTSTEPSEGSAPGSPAGSPTSTEEGTSTEPSEGSAPGTSTEPSEGSAPGTSESATPESGPGTSTEPSEGSAPGTSESATPESGPGSEPATSGSETPGTSTEPSEGSAPGTSTEPSEGSAPGTSESATPESGPGTSESATPESGPGSPAGSPTSTEEGTSESATPESGPGSEPATSGSETPGTSESATPESGPGTSTEPSEGSAPGTSTEPSEGSAPGTSTEPSEGSAPGTSTEPSEGSAPGTSTEPSEGSAPGTSTEPSEGSAPGSPAGSPTSTEEGTSTEPSEGSAPGTSESATPESGPGSEPATSGSETPGTSESATPESGPGSEPATSGSETPGTSESATPESGPGTSTEPSEGSAPGTSESATPESGPGSPAGSPTSTEEGSPAGSPTSTEEGSPAGSPTSTEEGTSESATPESGPGTSTEPSEGSAPGTSESATPESGPGSEPATSGSETPGTSESATPESGPGSEPATSGSETPGTSESATPESGPGTSTEPSEGSAPGSPAGSPTSTEEGTSESATPESGPGSEPATSGSETPGTSESATPESGPGSPAGSPTSTEEGSPAGSPTSTEEGTSTEPSEGSAPGTSESATPESGPGTSESATPESGPGTSESATPESGPGSEPATSGSETPGSEPATSGSETPGSPAGSPTSTEEGTSTEPSEGSAPGTSTEPSEGSAPGSEPATSGSETPGTSESATPESGPGTSTEPSEGSAPGMRPSGRKSSKMQAFRIWDVNQKTFYLRNNQLVAGYLQGPNVNLEEKIDVVPIEPHALFLGIHGGKMCLSCVKSGDETRLQLEAVNITDLSENRKQDKRFAFIRSDSGPTTSFESAACPGWFLCTAMEADQPVSLTNMPDEGVMVTKFYFQEDE

SEQ ID NO: 1515 - protein, 647 aa, Artificial Sequence
  Description of Artificial Sequence: Synthetic polypeptide
KCNTATCATQRLANFLVHSSNNFGAILSSTNVGSNTYGGSPAGSPTSTEEGTSESATPESGPGTSTEPSEGSAPGSPAGSPTSTEEGTSTEPSEGSAPGTSTEPSEGSAPGTSESATPESGPGSEPATSGSETPGSEPATSGSETPGSPAGSPTSTEEGTSESATPESGPGTSTEPSEGSAPGTSTEPSEGSAPGSPAGSPTSTEEGTSTEPSEGSAPGTSTEPSEGSAPGTSESATPESGPGTSTEPSEGSAPGTSESATPESGPGSEPATSGSETPGTSTEPSEGSAPGTSTEPSEGSAPGTSESATPESGPGTSESATPESGPGSPAGSPTSTEEGTSESATPESGPGSEPATSGSETPGTSESATPESGPGTSTEPSEGSAPGTSTEPSEGSAPGTSTEPSEGSAPGTSTEPSEGSAPGTSTEPSEGSAPGTSTEPSEGSAPGSPAGSPTSTEEGTSTEPSEGSAPGTSESATPESGPGSEPATSGSETPGTSESATPESGPGSEPATSGSETPGTSESATPESGPGTSTEPSEGSAPGTSESATPESGPGSPAGSPTSTEEGSPAGSPTSTEEGSPAGSPTSTEEGTSESATPESGPGTSTEPSEGSAPGCGNLSTCMLGTYTQDFNKFHTFPQTAIGVGAP

SEQ ID NO: 1516 - protein, 651 aa, Artificial Sequence
  Description of Artificial Sequence: Synthetic polypeptide
KCNTATCATQRLANFLVHSSNNFGAILSSTNVGSNTYGGSPAGSPTSTEEGTSESATPESGPGTSTEPSEGSAPGSPAGSPTSTEEGTSTEPSEGSAPGTSTEPSEGSAPGTSESATPESGPGSEPATSGSETPGSEPATSGSETPGSPAGSPTSTEEGTSESATPESGPGTSTEPSEGSAPGTSTEPSEGSAPGSPAGSPTSTEEGTSTEPSEGSAPGTSTEPSEGSAPGTSESATPESGPGTSTEPSEGSAPGTSESATPESGPGSEPATSGSETPGTSTEPSEGSAPGTSTEPSEGSAPGTSESATPESGPGTSESATPESGPGSPAGSPTSTEEGTSESATPESGPGSEPATSGSETPGTSESATPESGPGTSTEPSEGSAPGTSTEPSEGSAPGTSTEPSEGSAPGTSTEPSEGSAPGTSTEPSEGSAPGTSTEPSEGSAPGSPAGSPTSTEEGTSTEPSEGSAPGTSESATPESGPGSEPATSGSETPGTSESATPESGPGSEPATSGSETPGTSESATPESGPGTSTEPSEGSAPGTSESATPESGPGSPAGSPTSTEEGSPAGSPTSTEEGSPAGSPTSTEEGTSESATPESGPGTSTEPSEGSAPGACDTATCVTHRLAGLLSRSGGVVKNMVPTNVGSKAF

SEQ ID NO: 1517 - protein, 648 aa, Artificial Sequence
  Description of Artificial Sequence: Synthetic polypeptide
KCNTATCATQRLANFLVHSSNNFGAILSSTNVGSNTYGGSPAGSPTSTEEGTSESATPESGPGTSTEPSEGSAPGSPAGSPTSTEEGTSTEPSEGSAPGTSTEPSEGSAPGTSESATPESGPGSEPATSGSETPGSEPATSGSETPGSPAGSPTSTEEGTSESATPESGPGTSTEPSEGSAPGTSTEPSEGSAPGSPAGSPTSTEEGTSTEPSEGSAPGTSTEPSEGSAPGTSESATPESGPGTSTEPSEGSAPGTSESATPESGPGSEPATSGSETPGTSTEPSEGSAPGTSTEPSEGSAPGTSESATPESGPGTSESATPESGPGSPAGSPTSTEEGTSESATPESGPGSEPATSGSETPGTSESATPESGPGTSTEPSEGSAPGTSTEPSEGSAPGTSTEPSEGSAPGTSTEPSEGSAPGTSTEPSEGSAPGTSTEPSEGSAPGSPAGSPTSTEEGTSTEPSEGSAPGTSESATPESGPGSEPATSGSETPGTSESATPESGPGSEPATSGSETPGTSESATPESGPGTSTEPSEGSAPGTSESATPESGPGSPAGSPTSTEEGSPAGSPTSTEEGSPAGSPTSTEEGTSESATPESGPGTSTEPSEGSAPGKAPSGRMSIVKNLQNLDPSHRISDRDYMGWMDF

SEQ ID NO: 1518 - protein, 623 aa, Artificial Sequence
  Description of Artificial Sequence: Synthetic polypeptide
KCNTATCATQRLANFLVHSSNNFGAILSSTNVGSNTYGGSPAGSPTSTEEGTSESATPESGPGTSTEPSEGSAPGSPAGSPTSTEEGTSTEPSEGSAPGTSTEPSEGSAPGTSESATPESGPGSEPATSGSETPGSEPATSGSETPGSPAGSPTSTEEGTSESATPESGPGTSTEPSEGSAPGTSTEPSEGSAPGSPAGSPTSTEEGTSTEPSEGSAPGTSTEPSEGSAPGTSESATPESGPGTSTEPSEGSAPGTSESATPESGPGSEPATSGSETPGTSTEPSEGSAPGTSTEPSEGSAPGTSESATPESGPGTSESATPESGPGSPAGSPTSTEEGTSESATPESGPGSEPATSGSETPGTSESATPESGPGTSTEPSEGSAPGTSTEPSEGSAPGTSTEPSEGSAPGTSTEPSEGSAPGTSTEPSEGSAPGTSTEPSEGSAPGSPAGSPTSTEEGTSTEPSEGSAPGTSESATPESGPGSEPATSGSETPGTSESATPESGPGSEPATSGSETPGTSESATPESGPGTSTEPSEGSAPGTSESATPESGPGSPAGSPTSTEEGSPAGSPTSTEEGSPAGSPTSTEEGTSESATPESGPGTSTEPSEGSAPGDYMGWMDF

SEQ ID NO: 1519 - protein, 654 aa, Artificial Sequence
  Description of Artificial Sequence: Synthetic polypeptide
KCNTATCATQRLANFLVHSSNNFGAILSSTNVGSNTYGGSPAGSPTSTEEGTSESATPESGPGTSTEPSEGSAPGSPAGSPTSTEEGTSTEPSEGSAPGTSTEPSEGSAPGTSESATPESGPGSEPATSGSETPGSEPATSGSETPGSPAGSPTSTEEGTSESATPESGPGTSTEPSEGSAPGTSTEPSEGSAPGSPAGSPTSTEEGTSTEPSEGSAPGTSTEPSEGSAPGTSESATPESGPGTSTEPSEGSAPGTSESATPESGPGSEPATSGSETPGTSTEPSEGSAPGTSTEPSEGSAPGTSESATPESGPGTSESATPESGPGSPAGSPTSTEEGTSESATPESGPGSEPATSGSETPGTSESATPESGPGTSTEPSEGSAPGTSTEPSEGSAPGTSTEPSEGSAPGTSTEPSEGSAPGTSTEPSEGSAPGTSTEPSEGSAPGSPAGSPTSTEEGTSTEPSEGSAPGTSESATPESGPGSEPATSGSETPGTSESATPESGPGSEPATSGSETPGTSESATPESGPGTSTEPSEGSAPGTSESATPESGPGSPAGSPTSTEEGSPAGSPTSTEEGSPAGSPTSTEEGTSESATPESGPGTSTEPSEGSAPGHSDGTFTSDLSKQMEEEAVRLFIEWLKNGGPSSGAPPPS

SEQ ID NO: 1520 - protein, 654 aa, Artificial Sequence
  Description of Artificial Sequence: Synthetic polypeptide
KCNTATCATQRLANFLVHSSNNFGAILSSTNVGSNTYGGSPAGSPTSTEEGTSESATPESGPGTSTEPSEGSAPGSPAGSPTSTEEGTSTEPSEGSAPGTSTEPSEGSAPGTSESATPESGPGSEPATSGSETPGSEPATSGSETPGSPAGSPTSTEEGTSESATPESGPGTSTEPSEGSAPGTSTEPSEGSAPGSPAGSPTSTEEGTSTEPSEGSAPGTSTEPSEGSAPGTSESATPESGPGTSTEPSEGSAPGTSESATPESGPGSEPATSGSETPGTSTEPSEGSAPGTSTEPSEGSAPGTSESATPESGPGTSESATPESGPGSPAGSPTSTEEGTSESATPESGPGSEPATSGSETPGTSESATPESGPGTSTEPSEGSAPGTSTEPSEGSAPGTSTEPSEGSAPGTSTEPSEGSAPGTSTEPSEGSAPGTSTEPSEGSAPGSPAGSPTSTEEGTSTEPSEGSAPGTSESATPESGPGSEPATSGSETPGTSESATPESGPGSEPATSGSETPGTSESATPESGPGTSTEPSEGSAPGTSESATPESGPGSPAGSPTSTEEGSPAGSPTSTEEGSPAGSPTSTEEGTSESATPESGPGTSTEPSEGSAPGHGEGTFTSDLSKQMEEEAVRLFIEWLKNGGPSSGAPPPS

SEQ ID NO: 1521 - protein, 942 aa, Artificial Sequence
  Description of Artificial Sequence: Synthetic polypeptide
KCNTATCATQRLANFLVHSSNNFGAILSSTNVGSNTYGGSPAGSPTSTEEGTSESATPESGPGTSTEPSEGSAPGSPAGSPTSTEEGTSTEPSEGSAPGTSTEPSEGSAPGTSESATPESGPGSEPATSGSETPGSEPATSGSETPGSPAGSPTSTEEGTSESATPESGPGTSTEPSEGSAPGTSTEPSEGSAPGSPAGSPTSTEEGTSTEPSEGSAPGTSTEPSEGSAPGTSESATPESGPGTSTEPSEGSAPGTSESATPESGPGSEPATSGSETPGTSTEPSEGSAPGTSTEPSEGSAPGTSESATPESGPGTSESATPESGPGSPAGSPTSTEEGTSESATPESGPGSEPATSGSETPGTSESATPESGPGTSTEPSEGSAPGTSTEPSEGSAPGTSTEPSEGSAPGTSTEPSEGSAPGTSTEPSEGSAPGTSTEPSEGSAPGSPAGSPTSTEEGTSTEPSEGSAPGTSESATPESGPGSEPATSGSETPGTSESATPESGPGSEPATSGSETPGTSESATPESGPGTSTEPSEGSAPGTSESATPESGPGSPAGSPTSTEEGSPAGSPTSTEEGSPAGSPTSTEEGTSESATPESGPGTSTEPSEGSAPGTSESATPESGPGSEPATSGSETPGTSESATPESGPGSEPATSGSETPGTSESATPESGPGTSTEPSEGSAPGSPAGSPTSTEEGTSESATPESGPGSEPATSGSETPGTSESATPESGPGSPAGSPTSTEEGSPAGSPTSTEEGTSTEPSEGSAPGTSESATPESGPGTSESATPESGPGTSESATPESGPGSEPATSGSETPGSEPATSGSETPGSPAGSPTSTEEGTSTEPSEGSAPGTSTEPSEGSAPGSEPATSGSETPGTSESATPESGPGTSTEPSEGSAPGHGEGTFTSDLSKQMEEEAVRLFIEWLKNGGPSSGAPPPS

SEQ ID NO: 1522 - protein, 831 aa, Artificial Sequence
  Description of Artificial Sequence: Synthetic polypeptide
KCNTATCATQRLANFLVHSSNNFGAILSSTNVGSNTYGGSPAGSPTSTEEGTSESATPESGPGTSTEPSEGSAPGSPAGSPTSTEEGTSTEPSEGSAPGTSTEPSEGSAPGTSESATPESGPGSEPATSGSETPGSEPATSGSETPGSPAGSPTSTEEGTSESATPESGPGTSTEPSEGSAPGTSTEPSEGSAPGSPAGSPTSTEEGTSTEPSEGSAPGTSTEPSEGSAPGTSESATPESGPGTSTEPSEGSAPGTSESATPESGPGSEPATSGSETPGTSTEPSEGSAPGTSTEPSEGSAPGTSESATPESGPGTSESATPESGPGSPAGSPTSTEEGTSESATPESGPGSEPATSGSETPGTSESATPESGPGTSTEPSEGSAPGTSTEPSEGSAPGTSTEPSEGSAPGTSTEPSEGSAPGTSTEPSEGSAPGTSTEPSEGSAPGSPAGSPTSTEEGTSTEPSEGSAPGTSESATPESGPGSEPATSGSETPGTSESATPESGPGSEPATSGSETPGTSESATPESGPGTSTEPSEGSAPGTSESATPESGPGSPAGSPTSTEEGSPAGSPTSTEEGSPAGSPTSTEEGTSESATPESGPGTSTEPSEGSAPGMRSGCVVVHVWILAGLWLAVAGRPLAFSDAGPHVHYGWGDPIRLRHLYTSGPHGLSSCFLRIRADGVVDCARGQSAHSLLEIKAVALRTVAIKGVHSVRYLCMGADGKMQGLLQYSEEDCAFEEEIRPDGYNVYRSEKHRLPVSLSSAKQRQLYKNRGFLPLSHFLPMLPMVPEEPEDLRGHLESDMFSSPLETDSMDPFGLVTGLEAVRSPSFEK

SEQ ID NO: 1523 - protein, 824 aa, Artificial Sequence
  Description of Artificial Sequence: Synthetic polypeptide
KCNTATCATQRLANFLVHSSNNFGAILSSTNVGSNTYGGSPAGSPTSTEEGTSESATPESGPGTSTEPSEGSAPGSPAGSPTSTEEGTSTEPSEGSAPGTSTEPSEGSAPGTSESATPESGPGSEPATSGSETPGSEPATSGSETPGSPAGSPTSTEEGTSESATPESGPGTSTEPSEGSAPGTSTEPSEGSAPGSPAGSPTSTEEGTSTEPSEGSAPGTSTEPSEGSAPGTSESATPESGPGTSTEPSEGSAPGTSESATPESGPGSEPATSGSETPGTSTEPSEGSAPGTSTEPSEGSAPGTSESATPESGPGTSESATPESGPGSPAGSPTSTEEGTSESATPESGPGSEPATSGSETPGTSESATPESGPGTSTEPSEGSAPGTSTEPSEGSAPGTSTEPSEGSAPGTSTEPSEGSAPGTSTEPSEGSAPGTSTEPSEGSAPGSPAGSPTSTEEGTSTEPSEGSAPGTSESATPESGPGSEPATSGSETPGTSESATPESGPGSEPATSGSETPGTSESATPESGPGTSTEPSEGSAPGTSESATPESGPGSPAGSPTSTEEGSPAGSPTSTEEGSPAGSPTSTEEGTSESATPESGPGTSTEPSEGSAPGMDSDETGFEHSGLWVSVLAGLLLGACQAHPIPDSSPLLQFGGQVRQRYLYTDDAQQTEAHLEIREDGTVGGAADQSPESLLQLKALKPGVIQILGVKTSRFLCQRPDGALYGSLHFDPEACSFRELLLEDGYNVYQSEAHGLPLHLPGNKSPHRDPAPRGPARFLPLPGLPPALPEPPGILAPQPPDVGSSDPLSMVGPSQGRSPSYAS

SEQ ID NO: 1524 - protein, 649 aa, Artificial Sequence
  Description of Artificial Sequence: Synthetic polypeptide
KCNTATCATQRLANFLVHSSNNFGAILSSTNVGSNTYGGSPAGSPTSTEEGTSESATPESGPGTSTEPSEGSAPGSPAGSPTSTEEGTSTEPSEGSAPGTSTEPSEGSAPGTSESATPESGPGSEPATSGSETPGSEPATSGSETPGSPAGSPTSTEEGTSESATPESGPGTSTEPSEGSAPGTSTEPSEGSAPGSPAGSPTSTEEGTSTEPSEGSAPGTSTEPSEGSAPGTSESATPESGPGTSTEPSEGSAPGTSESATPESGPGSEPATSGSETPGTSTEPSEGSAPGTSTEPSEGSAPGTSESATPESGPGTSESATPESGPGSPAGSPTSTEEGTSESATPESGPGSEPATSGSETPGTSESATPESGPGTSTEPSEGSAPGTSTEPSEGSAPGTSTEPSEGSAPGTSTEPSEGSAPGTSTEPSEGSAPGTSTEPSEGSAPGSPAGSPTSTEEGTSTEPSEGSAPGTSESATPESGPGSEPATSGSETPGTSESATPESGPGSEPATSGSETPGTSESATPESGPGTSTEPSEGSAPGTSESATPESGPGSPAGSPTSTEEGSPAGSPTSTEEGSPAGSPTSTEEGTSESATPESGPGTSTEPSEGSAPGQLGPQGPPHLVADPSKKQGPWLEEEEEAYGWMDF

SEQ ID NO: 1525 - protein, 637 aa, Artificial Sequence
  Description of Artificial Sequence: Synthetic polypeptide
KCNTATCATQRLANFLVHSSNNFGAILSSTNVGSNTYGGSPAGSPTSTEEGTSESATPESGPGTSTEPSEGSAPGSPAGSPTSTEEGTSTEPSEGSAPGTSTEPSEGSAPGTSESATPESGPGSEPATSGSETPGSEPATSGSETPGSPAGSPTSTEEGTSESATPESGPGTSTEPSEGSAPGTSTEPSEGSAPGSPAGSPTSTEEGTSTEPSEGSAPGTSTEPSEGSAPGTSESATPESGPGTSTEPSEGSAPGTSESATPESGPGSEPATSGSETPGTSTEPSEGSAPGTSTEPSEGSAPGTSESATPESGPGTSESATPESGPGSPAGSPTSTEEGTSESATPESGPGSEPATSGSETPGTSESATPESGPGTSTEPSEGSAPGTSTEPSEGSAPGTSTEPSEGSAPGTSTEPSEGSAPGTSTEPSEGSAPGTSTEPSEGSAPGSPAGSPTSTEEGTSTEPSEGSAPGTSESATPESGPGSEPATSGSETPGTSESATPESGPGSEPATSGSETPGTSESATPESGPGTSTEPSEGSAPGTSESATPESGPGSPAGSPTSTEEGSPAGSPTSTEEGSPAGSPTSTEEGTSESATPESGPGTSTEPSEGSAPGDPSKKQGPWLEEEEEAYGWMDF

SEQ ID NO: 1526 - protein, 657 aa, Artificial Sequence
  Description of Artificial Sequence: Synthetic polypeptide
KCNTATCATQRLANFLVHSSNNFGAILSSTNVGSNTYGGSPAGSPTSTEEGTSESATPESGPGTSTEPSEGSAPGSPAGSPTSTEEGTSTEPSEGSAPGTSTEPSEGSAPGTSESATPESGPGSEPATSGSETPGSEPATSGSETPGSPAGSPTSTEEGTSESATPESGPGTSTEPSEGSAPGTSTEPSEGSAPGSPAGSPTSTEEGTSTEPSEGSAPGTSTEPSEGSAPGTSESATPESGPGTSTEPSEGSAPGTSESATPESGPGSEPATSGSETPGTSTEPSEGSAPGTSTEPSEGSAPGTSESATPESGPGTSESATPESGPGSPAGSPTSTEEGTSESATPESGPGSEPATSGSETPGTSESATPESGPGTSTEPSEGSAPGTSTEPSEGSAPGTSTEPSEGSAPGTSTEPSEGSAPGTSTEPSEGSAPGTSTEPSEGSAPGSPAGSPTSTEEGTSTEPSEGSAPGTSESATPESGPGSEPATSGSETPGTSESATPESGPGSEPATSGSETPGTSESATPESGPGTSTEPSEGSAPGTSESATPESGPGSPAGSPTSTEEGSPAGSPTSTEEGSPAGSPTSTEEGTSESATPESGPGTSTEPSEGSAPGYAEGTFISDYSIAMDKIHQQDFVNWLLAQKGKKNDWKHNITQ

SEQ ID NO: 1527 - protein, 644 aa, Artificial Sequence
  Description of Artificial Sequence: Synthetic polypeptide
KCNTATCATQRLANFLVHSSNNFGAILSSTNVGSNTYGGSPAGSPTSTEEGTSESATPESGPGTSTEPSEGSAPGSPAGSPTSTEEGTSTEPSEGSAPGTSTEPSEGSAPGTSESATPESGPGSEPATSGSETPGSEPATSGSETPGSPAGSPTSTEEGTSESATPESGPGTSTEPSEGSAPGTSTEPSEGSAPGSPAGSPTSTEEGTSTEPSEGSAPGTSTEPSEGSAPGTSESATPESGPGTSTEPSEGSAPGTSESATPESGPGSEPATSGSETPGTSTEPSEGSAPGTSTEPSEGSAPGTSESATPESGPGTSESATPESGPGSPAGSPTSTEEGTSESATPESGPGSEPATSGSETPGTSESATPESGPGTSTEPSEGSAPGTSTEPSEGSAPGTSTEPSEGSAPGTSTEPSEGSAPGTSTEPSEGSAPGTSTEPSEGSAPGSPAGSPTSTEEGTSTEPSEGSAPGTSESATPESGPGSEPATSGSETPGTSESATPESGPGSEPATSGSETPGTSESATPESGPGTSTEPSEGSAPGTSESATPESGPGSPAGSPTSTEEGSPAGSPTSTEEGSPAGSPTSTEEGTSESATPESGPGTSTEPSEGSAPGHSQGTFTSDYSKYLDSRRAQDFVQWLMNT

SEQ ID NO: 1528 - protein, 652 aa, Artificial Sequence
  Description of Artificial Sequence: Synthetic polypeptide
KCNTATCATQRLANFLVHSSNNFGAILSSTNVGSNTYGGSPAGSPTSTEEGTSESATPESGPGTSTEPSEGSAPGSPAGSPTSTEEGTSTEPSEGSAPGTSTEPSEGSAPGTSESATPESGPGSEPATSGSETPGSEPATSGSETPGSPAGSPTSTEEGTSESATPESGPGTSTEPSEGSAPGTSTEPSEGSAPGSPAGSPTSTEEGTSTEPSEGSAPGTSTEPSEGSAPGTSESATPESGPGTSTEPSEGSAPGTSESATPESGPGSEPATSGSETPGTSTEPSEGSAPGTSTEPSEGSAPGTSESATPESGPGTSESATPESGPGSPAGSPTSTEEGTSESATPESGPGSEPATSGSETPGTSESATPESGPGTSTEPSEGSAPGTSTEPSEGSAPGTSTEPSEGSAPGTSTEPSEGSAPGTSTEPSEGSAPGTSTEPSEGSAPGSPAGSPTSTEEGTSTEPSEGSAPGTSESATPESGPGSEPATSGSETPGTSESATPESGPGSEPATSGSETPGTSESATPESGPGTSTEPSEGSAPGTSESATPESGPGSPAGSPTSTEEGSPAGSPTSTEEGSPAGSPTSTEEGTSESATPESGPGTSTEPSEGSAPGHDEFERHAEGTFTSDVSSTLEGQAALEFIAWLVKGRG

SEQ ID NO: 1529 - protein, 645 aa, Artificial Sequence
  Description of Artificial Sequence: Synthetic polypeptide
KCNTATCATQRLANFLVHSSNNFGAILSSTNVGSNTYGGSPAGSPTSTEEGTSESATPESGPGTSTEPSEGSAPGSPAGSPTSTEEGTSTEPSEGSAPGTSTEPSEGSAPGTSESATPESGPGSEPATSGSETPGSEPATSGSETPGSPAGSPTSTEEGTSESATPESGPGTSTEPSEGSAPGTSTEPSEGSAPGSPAGSPTSTEEGTSTEPSEGSAPGTSTEPSEGSAPGTSESATPESGPGTSTEPSEGSAPGTSESATPESGPGSEPATSGSETPGTSTEPSEGSAPGTSTEPSEGSAPGTSESATPESGPGTSESATPESGPGSPAGSPTSTEEGTSESATPESGPGSEPATSGSETPGTSESATPESGPGTSTEPSEGSAPGTSTEPSEGSAPGTSTEPSEGSAPGTSTEPSEGSAPGTSTEPSEGSAPGTSTEPSEGSAPGSPAGSPTSTEEGTSTEPSEGSAPGTSESATPESGPGSEPATSGSETPGTSESATPESGPGSEPATSGSETPGTSESATPESGPGTSTEPSEGSAPGTSESATPESGPGSPAGSPTSTEEGSPAGSPTSTEEGSPAGSPTSTEEGTSESATPESGPGTSTEPSEGSAPGHAEGTFTSDVSSYLEGQAALEFIAWLVKGR

SEQ ID NO: 1530 - protein, 648 aa, Artificial Sequence
  Description of Artificial Sequence: Synthetic polypeptide
KCNTATCATQRLANFLVHSSNNFGAILSSTNVGSNTYGGSPAGSPTSTEEGTSESATPESGPGTSTEPSEGSAPGSPAGSPTSTEEGTSTEPSEGSAPGTSTEPSEGSAPGTSESATPESGPGSEPATSGSETPGSEPATSGSETPGSPAGSPTSTEEGTSESATPESGPGTSTEPSEGSAPGTSTEPSEGSAPGSPAGSPTSTEEGTSTEPSEGSAPGTSTEPSEGSAPGTSESATPESGPGTSTEPSEGSAPGTSESATPESGPGSEPATSGSETPGTSTEPSEGSAPGTSTEPSEGSAPGTSESATPESGPGTSESATPESGPGSPAGSPTSTEEGTSESATPESGPGSEPATSGSETPGTSESATPESGPGTSTEPSEGSAPGTSTEPSEGSAPGTSTEPSEGSAPGTSTEPSEGSAPGTSTEPSEGSAPGTSTEPSEGSAPGSPAGSPTSTEEGTSTEPSEGSAPGTSESATPESGPGSEPATSGSETPGTSESATPESGPGSEPATSGSETPGTSESATPESGPGTSTEPSEGSAPGTSESATPESGPGSPAGSPTSTEEGSPAGSPTSTEEGSPAGSPTSTEEGTSESATPESGPGTSTEPSEGSAPGHADGSFSDEMNTILDNLAARDFINWLIETKITD

SEQ ID NO: 1531 - protein, 685 aa, Artificial Sequence
  Description of Artificial Sequence: Synthetic polypeptide
KCNTATCATQRLANFLVHSSNNFGAILSSTNVGSNTYGGSPAGSPTSTEEGTSESATPESGPGTSTEPSEGSAPGSPAGSPTSTEEGTSTEPSEGSAPGTSTEPSEGSAPGTSESATPESGPGSEPATSGSETPGSEPATSGSETPGSPAGSPTSTEEGTSESATPESGPGTSTEPSEGSAPGTSTEPSEGSAPGSPAGSPTSTEEGTSTEPSEGSAPGTSTEPSEGSAPGTSESATPESGPGTSTEPSEGSAPGTSESATPESGPGSEPATSGSETPGTSTEPSEGSAPGTSTEPSEGSAPGTSESATPESGPGTSESATPESGPGSPAGSPTSTEEGTSESATPESGPGSEPATSGSETPGTSESATPESGPGTSTEPSEGSAPGTSTEPSEGSAPGTSTEPSEGSAPGTSTEPSEGSAPGTSTEPSEGSAPGTSTEPSEGSAPGSPAGSPTSTEEGTSTEPSEGSAPGTSESATPESGPGSEPATSGSETPGTSESATPESGPGSEPATSGSETPGTSESATPESGPGTSTEPSEGSAPGTSESATPESGPGSPAGSPTSTEEGSPAGSPTSTEEGSPAGSPTSTEEGTSESATPESGPGTSTEPSEGSAPGGPETLCGAELVDALQFVCGDRGFYFNKPTGYGSSSRRAPQTGIVDECCFRSCDLRRLEMYCAPLKPAKSA

SEQ ID NO: 1532 - protein, 682 aa, Artificial Sequence
  Description of Artificial Sequence: Synthetic polypeptide
KCNTATCATQRLANFLVHSSNNFGAILSSTNVGSNTYGGSPAGSPTSTEEGTSESATPESGPGTSTEPSEGSAPGSPAGSPTSTEEGTSTEPSEGSAPGTSTEPSEGSAPGTSESATPESGPGSEPATSGSETPGSEPATSGSETPGSPAGSPTSTEEGTSESATPESGPGTSTEPSEGSAPGTSTEPSEGSAPGSPAGSPTSTEEGTSTEPSEGSAPGTSTEPSEGSAPGTSESATPESGPGTSTEPSEGSAPGTSESATPESGPGSEPATSGSETPGTSTEPSEGSAPGTSTEPSEGSAPGTSESATPESGPGTSESATPESGPGSPAGSPTSTEEGTSESATPESGPGSEPATSGSETPGTSESATPESGPGTSTEPSEGSAPGTSTEPSEGSAPGTSTEPSEGSAPGTSTEPSEGSAPGTSTEPSEGSAPGTSTEPSEGSAPGSPAGSPTSTEEGTSTEPSEGSAPGTSESATPESGPGSEPATSGSETPGTSESATPESGPGSEPATSGSETPGTSESATPESGPGTSTEPSEGSAPGTSESATPESGPGSPAGSPTSTEEGSPAGSPTSTEEGSPAGSPTSTEEGTSESATPESGPGTSTEPSEGSAPGAYRPSETLCGGELVDTLQFVCGDRGFYFSRPASRVSRRSRGIVEECCFRSCDLALLETYCATPAKSE

SEQ ID NO: 1533 - protein, 764 aa, Artificial Sequence
  Description of Artificial Sequence: Synthetic polypeptide
KCNTATCATQRLANFLVHSSNNFGAILSSTNVGSNTYGGSPAGSPTSTEEGTSESATPESGPGTSTEPSEGSAPGSPAGSPTSTEEGTSTEPSEGSAPGTSTEPSEGSAPGTSESATPESGPGSEPATSGSETPGSEPATSGSETPGSPAGSPTSTEEGTSESATPESGPGTSTEPSEGSAPGTSTEPSEGSAPGSPAGSPTSTEEGTSTEPSEGSAPGTSTEPSEGSAPGTSESATPESGPGTSTEPSEGSAPGTSESATPESGPGSEPATSGSETPGTSTEPSEGSAPGTSTEPSEGSAPGTSESATPESGPGTSESATPESGPGSPAGSPTSTEEGTSESATPESGPGSEPATSGSETPGTSESATPESGPGTSTEPSEGSAPGTSTEPSEGSAPGTSTEPSEGSAPGTSTEPSEGSAPGTSTEPSEGSAPGTSTEPSEGSAPGSPAGSPTSTEEGTSTEPSEGSAPGTSESATPESGPGSEPATSGSETPGTSESATPESGPGSEPATSGSETPGTSESATPESGPGTSTEPSEGSAPGTSESATPESGPGSPAGSPTSTEEGSPAGSPTSTEEGSPAGSPTSTEEGTSESATPESGPGTSTEPSEGSAPGEESQKKLPSSRITCPQGSVAYGSYCYSLILIPQTWSNAELSCQMHFSGHLAFLLSTGEITFVSSLVKNSLTAYQYIWIGLHDPSHGTLPNGSGWKWSSSNVLTFYNWERNPSIAADRGYCAVLSQKSGFQKWRDFNCENELPYICKFKV

SEQ ID NO: 1534 - protein, 662 aa, Artificial Sequence
  Description of Artificial Sequence: Synthetic polypeptide
KCNTATCATQRLANFLVHSSNNFGAILSSTNVGSNTYGGSPAGSPTSTEEGTSESATPESGPGTSTEPSEGSAPGSPAGSPTSTEEGTSTEPSEGSAPGTSTEPSEGSAPGTSESATPESGPGSEPATSGSETPGSEPATSGSETPGSPAGSPTSTEEGTSESATPESGPGTSTEPSEGSAPGTSTEPSEGSAPGSPAGSPTSTEEGTSTEPSEGSAPGTSTEPSEGSAPGTSESATPESGPGTSTEPSEGSAPGTSESATPESGPGSEPATSGSETPGTSTEPSEGSAPGTSTEPSEGSAPGTSESATPESGPGTSESATPESGPGSPAGSPTSTEEGTSESATPESGPGSEPATSGSETPGTSESATPESGPGTSTEPSEGSAPGTSTEPSEGSAPGTSTEPSEGSAPGTSTEPSEGSAPGTSTEPSEGSAPGTSTEPSEGSAPGSPAGSPTSTEEGTSTEPSEGSAPGTSESATPESGPGSEPATSGSETPGTSESATPESGPGSEPATSGSETPGTSESATPESGPGTSTEPSEGSAPGTSESATPESGPGSPAGSPTSTEEGSPAGSPTSTEEGSPAGSPTSTEEGTSESATPESGPGTSTEPSEGSAPGTQAQLLRVGCVLGTCQVQNLSHRLWQLMGPAGRQDSAPVDPSSPHSY

SEQ ID NO: 1535 - protein, 761 aa, Artificial Sequence
  Description of Artificial Sequence: Synthetic polypeptide
KCNTATCATQRLANFLVHSSNNFGAILSSTNVGSNTYGGSPAGSPTSTEEGTSESATPESGPGTSTEPSEGSAPGSPAGSPTSTEEGTSTEPSEGSAPGTSTEPSEGSAPGTSESATPESGPGSEPATSGSETPGSEPATSGSETPGSPAGSPTSTEEGTSESATPESGPGTSTEPSEGSAPGTSTEPSEGSAPGSPAGSPTSTEEGTSTEPSEGSAPGTSTEPSEGSAPGTSESATPESGPGTSTEPSEGSAPGTSESATPESGPGSEPATSGSETPGTSTEPSEGSAPGTSTEPSEGSAPGTSESATPESGPGTSESATPESGPGSPAGSPTSTEEGTSESATPESGPGSEPATSGSETPGTSESATPESGPGTSTEPSEGSAPGTSTEPSEGSAPGTSTEPSEGSAPGTSTEPSEGSAPGTSTEPSEGSAPGTSTEPSEGSAPGSPAGSPTSTEEGTSTEPSEGSAPGTSESATPESGPGSEPATSGSETPGTSESATPESGPGSEPATSGSETPGTSESATPESGPGTSTEPSEGSAPGTSESATPESGPGSPAGSPTSTEEGSPAGSPTSTEEGSPAGSPTSTEEGTSESATPESGPGTSTEPSEGSAPGVPIQKVQDDTKTLIKTIVTRINDISHTQSVSSKQKVTGLDFIPGLHPILTLSKMDQTLAVYQQILTSMPSRNVIQISNDLENLRDLLHVLAFSKSCHLPWASGLETLDSLGGVLEASGYSTEVVALSRLQGSLQDMLWQLDLSPGC

SEQ ID NO: 1536 - protein, 640 aa, Artificial Sequence
  Description of Artificial Sequence: Synthetic polypeptide
KCNTATCATQRLANFLVHSSNNFGAILSSTNVGSNTYGGSPAGSPTSTEEGTSESATPESGPGTSTEPSEGSAPGSPAGSPTSTEEGTSTEPSEGSAPGTSTEPSEGSAPGTSESATPESGPGSEPATSGSETPGSEPATSGSETPGSPAGSPTSTEEGTSESATPESGPGTSTEPSEGSAPGTSTEPSEGSAPGSPAGSPTSTEEGTSTEPSEGSAPGTSTEPSEGSAPGTSESATPESGPGTSTEPSEGSAPGTSESATPESGPGSEPATSGSETPGTSTEPSEGSAPGTSTEPSEGSAPGTSESATPESGPGTSESATPESGPGSPAGSPTSTEEGTSESATPESGPGSEPATSGSETPGTSESATPESGPGTSTEPSEGSAPGTSTEPSEGSAPGTSTEPSEGSAPGTSTEPSEGSAPGTSTEPSEGSAPGTSTEPSEGSAPGSPAGSPTSTEEGTSTEPSEGSAPGTSESATPESGPGSEPATSGSETPGTSESATPESGPGSEPATSGSETPGTSESATPESGPGTSTEPSEGSAPGTSESATPESGPGSPAGSPTSTEEGSPAGSPTSTEEGSPAGSPTSTEEGTSESATPESGPGTSTEPSEGSAPGFRVDEEFQSPFASQSRGYFLFRPRN

SEQ ID NO: 1537 - protein, 652 aa, Artificial Sequence
  Description of Artificial Sequence: Synthetic polypeptide
KCNTATCATQRLANFLVHSSNNFGAILSSTNVGSNTYGGSPAGSPTSTEEGTSESATPESGPGTSTEPSEGSAPGSPAGSPTSTEEGTSTEPSEGSAPGTSTEPSEGSAPGTSESATPESGPGSEPATSGSETPGSEPATSGSETPGSPAGSPTSTEEGTSESATPESGPGTSTEPSEGSAPGTSTEPSEGSAPGSPAGSPTSTEEGTSTEPSEGSAPGTSTEPSEGSAPGTSESATPESGPGTSTEPSEGSAPGTSESATPESGPGSEPATSGSETPGTSTEPSEGSAPGTSTEPSEGSAPGTSESATPESGPGTSESATPESGPGSPAGSPTSTEEGTSESATPESGPGSEPATSGSETPGTSESATPESGPGTSTEPSEGSAPGTSTEPSEGSAPGTSTEPSEGSAPGTSTEPSEGSAPGTSTEPSEGSAPGTSTEPSEGSAPGSPAGSPTSTEEGTSTEPSEGSAPGTSESATPESGPGSEPATSGSETPGTSESATPESGPGSEPATSGSETPGTSESATPESGPGTSTEPSEGSAPGTSESATPESGPGSPAGSPTSTEEGSPAGSPTSTEEGSPAGSPTSTEEGTSESATPESGPGTSTEPSEGSAPGHSQGTFTSDYSKYLDSRRAQDFVQWLMNTKRNRNNIA

SEQ ID NO: 1538 - protein, 652 aa, Artificial Sequence
  Description of Artificial Sequence: Synthetic polypeptide
KCNTATCATQRLANFLVHSSNNFGAILSSTNVGSNTYGGSPAGSPTSTEEGTSESATPESGPGTSTEPSEGSAPGSPAGSPTSTEEGTSTEPSEGSAPGTSTEPSEGSAPGTSESATPESGPGSEPATSGSETPGSEPATSGSETPGSPAGSPTSTEEGTSESATPESGPGTSTEPSEGSAPGTSTEPSEGSAPGSPAGSPTSTEEGTSTEPSEGSAPGTSTEPSEGSAPGTSESATPESGPGTSTEPSEGSAPGTSESATPESGPGSEPATSGSETPGTSTEPSEGSAPGTSTEPSEGSAPGTSESATPESGPGTSESATPESGPGSPAGSPTSTEEGTSESATPESGPGSEPATSGSETPGTSESATPESGPGTSTEPSEGSAPGTSTEPSEGSAPGTSTEPSEGSAPGTSTEPSEGSAPGTSTEPSEGSAPGTSTEPSEGSAPGSPAGSPTSTEEGTSTEPSEGSAPGTSESATPESGPGSEPATSGSETPGTSESATPESGPGSEPATSGSETPGTSESATPESGPGTSTEPSEGSAPGTSESATPESGPGSPAGSPTSTEEGSPAGSPTSTEEGSPAGSPTSTEEGTSESATPESGPGTSTEPSEGSAPGKCNTATCATNRLANFLVHSSNNFGPILPPTNVGSNTY

SEQ ID NO: 1539 - protein, 651 aa, Artificial Sequence
  Description of Artificial Sequence: Synthetic polypeptide
KCNTATCATQRLANFLVHSSNNFGAILSSTNVGSNTYGGSPAGSPTSTEEGTSESATPESGPGTSTEPSEGSAPGSPAGSPTSTEEGTSTEPSEGSAPGTSTEPSEGSAPGTSESATPESGPGSEPATSGSETPGSEPATSGSETPGSPAGSPTSTEEGTSESATPESGPGTSTEPSEGSAPGTSTEPSEGSAPGSPAGSPTSTEEGTSTEPSEGSAPGTSTEPSEGSAPGTSESATPESGPGTSTEPSEGSAPGTSESATPESGPGSEPATSGSETPGTSTEPSEGSAPGTSTEPSEGSAPGTSESATPESGPGTSESATPESGPGSPAGSPTSTEEGTSESATPESGPGSEPATSGSETPGTSESATPESGPGTSTEPSEGSAPGTSTEPSEGSAPGTSTEPSEGSAPGTSTEPSEGSAPGTSTEPSEGSAPGTSTEPSEGSAPGSPAGSPTSTEEGTSTEPSEGSAPGTSESATPESGPGSEPATSGSETPGTSESATPESGPGSEPATSGSETPGTSESATPESGPGTSTEPSEGSAPGTSESATPESGPGSPAGSPTSTEEGSPAGSPTSTEEGSPAGSPTSTEEGTSESATPESGPGTSTEPSEGSAPGYPIKPEAPGEDASPEELNRYYASLRHYLNLVTRQRY

SEQ ID NO: 1540 - protein, 656 aa, Artificial Sequence
  Description of Artificial Sequence: Synthetic polypeptide
KCNTATCATQRLANFLVHSSNNFGAILSSTNVGSNTYGGSPAGSPTSTEEGTSESATPESGPGTSTEPSEGSAPGSPAGSPTSTEEGTSTEPSEGSAPGTSTEPSEGSAPGTSESATPESGPGSEPATSGSETPGSEPATSGSETPGSPAGSPTSTEEGTSESATPESGPGTSTEPSEGSAPGTSTEPSEGSAPGSPAGSPTSTEEGTSTEPSEGSAPGTSTEPSEGSAPGTSESATPESGPGTSTEPSEGSAPGTSESATPESGPGSEPATSGSETPGTSTEPSEGSAPGTSTEPSEGSAPGTSESATPESGPGTSESATPESGPGSPAGSPTSTEEGTSESATPESGPGSEPATSGSETPGTSESATPESGPGTSTEPSEGSAPGTSTEPSEGSAPGTSTEPSEGSAPGTSTEPSEGSAPGTSTEPSEGSAPGTSTEPSEGSAPGSPAGSPTSTEEGTSTEPSEGSAPGTSESATPESGPGSEPATSGSETPGTSESATPESGPGSEPATSGSETPGTSESATPESGPGTSTEPSEGSAPGTSESATPESGPGSPAGSPTSTEEGSPAGSPTSTEEGSPAGSPTSTEEGTSESATPESGPGTSTEPSEGSAPGIVLSLDVPIGLLQILLEQARARAAREQATTNARILARVGHC

SEQ ID NO: 1541 - protein, 653 aa, Artificial Sequence
  Description of Artificial Sequence: Synthetic polypeptide
KCNTATCATQRLANFLVHSSNNFGAILSSTNVGSNTYGGSPAGSPTSTEEGTSESATPESGPGTSTEPSEGSAPGSPAGSPTSTEEGTSTEPSEGSAPGTSTEPSEGSAPGTSESATPESGPGSEPATSGSETPGSEPATSGSETPGSPAGSPTSTEEGTSESATPESGPGTSTEPSEGSAPGTSTEPSEGSAPGSPAGSPTSTEEGTSTEPSEGSAPGTSTEPSEGSAPGTSESATPESGPGTSTEPSEGSAPGTSESATPESGPGSEPATSGSETPGTSTEPSEGSAPGTSTEPSEGSAPGTSESATPESGPGTSESATPESGPGSPAGSPTSTEEGTSESATPESGPGSEPATSGSETPGTSESATPESGPGTSTEPSEGSAPGTSTEPSEGSAPGTSTEPSEGSAPGTSTEPSEGSAPGTSTEPSEGSAPGTSTEPSEGSAPGSPAGSPTSTEEGTSTEPSEGSAPGTSESATPESGPGSEPATSGSETPGTSESATPESGPGSEPATSGSETPGTSESATPESGPGTSTEPSEGSAPGTSESATPESGPGSPAGSPTSTEEGSPAGSPTSTEEGSPAGSPTSTEEGTSESATPESGPGTSTEPSEGSAPGFTLSLDVPTNIMNLLFNIAKAKNLRAQAAANAHLMAQI

SEQ ID NO: 1542 - protein, 763 aa, Artificial Sequence
  Description of Artificial Sequence: Synthetic polypeptide
MRPSGRKSSKMQAFRIWDVNQKTFYLRNNQLVAGYLQGPNVNLEEKIDVVPIEPHALFLGIHGGKMCLSCVKSGDETRLQLEAVNITDLSENRKQDKRFAFIRSDSGPTTSFESAACPGWFLCTAMEADQPVSLTNMPDEGVMVTKFYFQEDEGGSPAGSPTSTEEGTSESATPESGPGTSTEPSEGSAPGSPAGSPTSTEEGTSTEPSEGSAPGTSTEPSEGSAPGTSESATPESGPGSEPATSGSETPGSEPATSGSETPGSPAGSPTSTEEGTSESATPESGPGTSTEPSEGSAPGTSTEPSEGSAPGSPAGSPTSTEEGTSTEPSEGSAPGTSTEPSEGSAPGTSESATPESGPGTSTEPSEGSAPGTSESATPESGPGSEPATSGSETPGTSTEPSEGSAPGTSTEPSEGSAPGTSESATPESGPGTSESATPESGPGSPAGSPTSTEEGTSESATPESGPGSEPATSGSETPGTSESATPESGPGTSTEPSEGSAPGTSTEPSEGSAPGTSTEPSEGSAPGTSTEPSEGSAPGTSTEPSEGSAPGTSTEPSEGSAPGSPAGSPTSTEEGTSTEPSEGSAPGTSESATPESGPGSEPATSGSETPGTSESATPESGPGSEPATSGSETPGTSESATPESGPGTSTEPSEGSAPGTSESATPESGPGSPAGSPTSTEEGSPAGSPTSTEEGSPAGSPTSTEEGTSESATPESGPGTSTEPSEGSAPGCGNLSTCMLGTYTQDFNKFHTFPQTAIGVGAP

SEQ ID NO: 1543 - protein, 767 aa, Artificial Sequence
  Description of Artificial Sequence: Synthetic polypeptide
MRPSGRKSSKMQAFRIWDVNQKTFYLRNNQLVAGYLQGPNVNLEEKIDVVPIEPHALFLGIHGGKMCLSCVKSGDETRLQLEAVNITDLSENRKQDKRFAFIRSDSGPTTSFESAACPGWFLCTAMEADQPVSLTNMPDEGVMVTKFYFQEDEGGSPAGSPTSTEEGTSESATPESGPGTSTEPSEGSAPGSPAGSPTSTEEGTSTEPSEGSAPGTSTEPSEGSAPGTSESATPESGPGSEPATSGSETPGSEPATSGSETPGSPAGSPTSTEEGTSESATPESGPGTSTEPSEGSAPGTSTEPSEGSAPGSPAGSPTSTEEGTSTEPSEGSAPGTSTEPSEGSAPGTSESATPESGPGTSTEPSEGSAPGTSESATPESGPGSEPATSGSETPGTSTEPSEGSAPGTSTEPSEGSAPGTSESATPESGPGTSESATPESGPGSPAGSPTSTEEGTSESATPESGPGSEPATSGSETPGTSESATPESGPGTSTEPSEGSAPGTSTEPSEGSAPGTSTEPSEGSAPGTSTEPSEGSAPGTSTEPSEGSAPGTSTEPSEGSAPGSPAGSPTSTEEGTSTEPSEGSAPGTSESATPESGPGSEPATSGSETPGTSESATPESGPGSEPATSGSETPGTSESATPESGPGTSTEPSEGSAPGTSESATPESGPGSPAGSPTSTEEGSPAGSPTSTEEGSPAGSPTSTEEGTSESATPESGPGTSTEPSEGSAPGACDTATCVTHRLAGLLSRSGGVVKNMVPTNVGSKAF

SEQ ID NO: 1544 - protein, 764 aa, Artificial Sequence
  Description of Artificial Sequence: Synthetic polypeptide
MRPSGRKSSKMQAFRIWDVNQKTFYLRNNQLVAGYLQGPNVNLEEKIDVVPIEPHALFLGIHGGKMCLSCVKSGDETRLQLEAVNITDLSENRKQDKRFAFIRSDSGPTTSFESAACPGWFLCTAMEADQPVSLTNMPDEGVMVTKFYFQEDEGGSPAGSPTSTEEGTSESATPESGPGTSTEPSEGSAPGSPAGSPTSTEEGTSTEPSEGSAPGTSTEPSEGSAPGTSESATPESGPGSEPATSGSETPGSEPATSGSETPGSPAGSPTSTEEGTSESATPESGPGTSTEPSEGSAPGTSTEPSEGSAPGSPAGSPTSTEEGTSTEPSEGSAPGTSTEPSEGSAPGTSESATPESGPGTSTEPSEGSAPGTSESATPESGPGSEPATSGSETPGTSTEPSEGSAPGTSTEPSEGSAPGTSESATPESGPGTSESATPESGPGSPAGSPTSTEEGTSESATPESGPGSEPATSGSETPGTSESATPESGPGTSTEPSEGSAPGTSTEPSEGSAPGTSTEPSEGSAPGTSTEPSEGSAPGTSTEPSEGSAPGTSTEPSEGSAPGSPAGSPTSTEEGTSTEPSEGSAPGTSESATPESGPGSEPATSGSETPGTSESATPESGPGSEPATSGSETPGTSESATPESGPGTSTEPSEGSAPGTSESATPESGPGSPAGSPTSTEEGSPAGSPTSTEEGSPAGSPTSTEEGTSESATPESGPGTSTEPSEGSAPGKAPSGRMSIVKNLQNLDPSHRISDRDYMGWMDF

SEQ ID NO: 1545 - protein, 739 aa, Artificial Sequence
  Description of Artificial Sequence: Synthetic polypeptide
MRPSGRKSSKMQAFRIWDVNQKTFYLRNNQLVAGYLQGPNVNLEEKIDVVPIEPHALFLGIHGGKMCLSCVKSGDETRLQLEAVNITDLSENRKQDKRFAFIRSDSGPTTSFESAACPGWFLCTAMEADQPVSLTNMPDEGVMVTKFYFQEDEGGSPAGSPTSTEEGTSESATPESGPGTSTEPSEGSAPGSPAGSPTSTEEGTSTEPSEGSAPGTSTEPSEGSAPGTSESATPESGPGSEPATSGSETPGSEPATSGSETPGSPAGSPTSTEEGTSESATPESGPGTSTEPSEGSAPGTSTEPSEGSAPGSPAGSPTSTEEGTSTEPSEGSAPGTSTEPSEGSAPGTSESATPESGPGTSTEPSEGSAPGTSESATPESGPGSEPATSGSETPGTSTEPSEGSAPGTSTEPSEGSAPGTSESATPESGPGTSESATPESGPGSPAGSPTSTEEGTSESATPESGPGSEPATSGSETPGTSESATPESGPGTSTEPSEGSAPGTSTEPSEGSAPGTSTEPSEGSAPGTSTEPSEGSAPGTSTEPSEGSAPGTSTEPSEGSAPGSPAGSPTSTEEGTSTEPSEGSAPGTSESATPESGPGSEPATSGSETPGTSESATPESGPGSEPATSGSETPGTSESATPESGPGTSTEPSEGSAPGTSESATPESGPGSPAGSPTSTEEGSPAGSPTSTEEGSPAGSPTSTEEGTSESATPESGPGTSTEPSEGSAPGDYMGWMDF

SEQ ID NO: 1546 - protein, 770 aa, Artificial Sequence
  Description of Artificial Sequence: Synthetic polypeptide
MRPSGRKSSKMQAFRIWDVNQKTFYLRNNQLVAGYLQGPNVNLEEKIDVVPIEPHALFLGIHGGKMCLSCVKSGDETRLQLEAVNITDLSENRKQDKRFAFIRSDSGPTTSFESAACPGWFLCTAMEADQPVSLTNMPDEGVMVTKFYFQEDEGGSPAGSPTSTEEGTSESATPESGPGTSTEPSEGSAPGSPAGSPTSTEEGTSTEPSEGSAPGTSTEPSEGSAPGTSESATPESGPGSEPATSGSETPGSEPATSGSETPGSPAGSPTSTEEGTSESATPESGPGTSTEPSEGSAPGTSTEPSEGSAPGSPAGSPTSTEEGTSTEPSEGSAPGTSTEPSEGSAPGTSESATPESGPGTSTEPSEGSAPGTSESATPESGPGSEPATSGSETPGTSTEPSEGSAPGTSTEPSEGSAPGTSESATPESGPGTSESATPESGPGSPAGSPTSTEEGTSESATPESGPGSEPATSGSETPGTSESATPESGPGTSTEPSEGSAPGTSTEPSEGSAPGTSTEPSEGSAPGTSTEPSEGSAPGTSTEPSEGSAPGTSTEPSEGSAPGSPAGSPTSTEEGTSTEPSEGSAPGTSESATPESGPGSEPATSGSETPGTSESATPESGPGSEPATSGSETPGTSESATPESGPGTSTEPSEGSAPGTSESATPESGPGSPAGSPTSTEEGSPAGSPTSTEEGSPAGSPTSTEEGTSESATPESGPGTSTEPSEGSAPGHSDGTFTSDLSKQMEEEAVRLFIEWLKNGGPSSGAPPPS

SEQ ID NO: 1547 - protein, 770 aa, Artificial Sequence
  Description of Artificial Sequence: Synthetic polypeptide
MRPSGRKSSKMQAFRIWDVNQKTFYLRNNQLVAGYLQGPNVNLEEKIDVVPIEPHALFLGIHGGKMCLSCVKSGDETRLQLEAVNITDLSENRKQDKRFAFIRSDSGPTTSFESAACPGWFLCTAMEADQPVSLTNMPDEGVMVTKFYFQEDEGGSPAGSPTSTEEGTSESATPESGPGTSTEPSEGSAPGSPAGSPTSTEEGTSTEPSEGSAPGTSTEPSEGSAPGTSESATPESGPGSEPATSGSETPGSEPATSGSETPGSPAGSPTSTEEGTSESATPESGPGTSTEPSEGSAPGTSTEPSEGSAPGSPAGSPTSTEEGTSTEPSEGSAPGTSTEPSEGSAPGTSESATPESGPGTSTEPSEGSAPGTSESATPESGPGSEPATSGSETPGTSTEPSEGSAPGTSTEPSEGSAPGTSESATPESGPGTSESATPESGPGSPAGSPTSTEEGTSESATPESGPGSEPATSGSETPGTSESATPESGPGTSTEPSEGSAPGTSTEPSEGSAPGTSTEPSEGSAPGTSTEPSEGSAPGTSTEPSEGSAPGTSTEPSEGSAPGSPAGSPTSTEEGTSTEPSEGSAPGTSESATPESGPGSEPATSGSETPGTSESATPESGPGSEPATSGSETPGTSESATPESGPGTSTEPSEGSAPGTSESATPESGPGSPAGSPTSTEEGSPAGSPTSTEEGSPAGSPTSTEEGTSESATPESGPGTSTEPSEGSAPGHGEGTFTSDLSKQMEEEAVRLFIEWLKNGGPSSGAPPPS

SEQ ID NO: 1548 - protein, 947 aa, Artificial Sequence
  Description of Artificial Sequence: Synthetic polypeptide
MRPSGRKSSKMQAFRIWDVNQKTFYLRNNQLVAGYLQGPNVNLEEKIDVVPIEPHALFLGIHGGKMCLSCVKSGDETRLQLEAVNITDLSENRKQDKRFAFIRSDSGPTTSFESAACPGWFLCTAMEADQPVSLTNMPDEGVMVTKFYFQEDEGGSPAGSPTSTEEGTSESATPESGPGTSTEPSEGSAPGSPAGSPTSTEEGTSTEPSEGSAPGTSTEPSEGSAPGTSESATPESGPGSEPATSGSETPGSEPATSGSETPGSPAGSPTSTEEGTSESATPESGPGTSTEPSEGSAPGTSTEPSEGSAPGSPAGSPTSTEEGTSTEPSEGSAPGTSTEPSEGSAPGTSESATPESGPGTSTEPSEGSAPGTSESATPESGPGSEPATSGSETPGTSTEPSEGSAPGTSTEPSEGSAPGTSESATPESGPGTSESATPESGPGSPAGSPTSTEEGTSESATPESGPGSEPATSGSETPGTSESATPESGPGTSTEPSEGSAPGTSTEPSEGSAPGTSTEPSEGSAPGTSTEPSEGSAPGTSTEPSEGSAPGTSTEPSEGSAPGSPAGSPTSTEEGTSTEPSEGSAPGTSESATPESGPGSEPATSGSETPGTSESATPESGPGSEPATSGSETPGTSESATPESGPGTSTEPSEGSAPGTSESATPESGPGSPAGSPTSTEEGSPAGSPTSTEEGSPAGSPTSTEEGTSESATPESGPGTSTEPSEGSAPGMRSGCVVVHVWILAGLWLAVAGRPLAFSDAGPHVHYGWGDPIRLRHLYTSGPHGLSSCFLRIRADGVVDCARGQSAHSLLEIKAVALRTVAIKGVHSVRYLCMGADGKMQGLLQYSEEDCAFEEEIRPDGYNVYRSEKHRLPVSLSSAKQRQLYKNRGFLPLSHFLPMLPMVPEEPEDLRGHLESDMFSSPLETDSMDPFGLVTGLEAVRSPSFEK

SEQ ID NO: 1549 - protein, 940 aa, Artificial Sequence
  Description of Artificial Sequence: Synthetic polypeptide
MRPSGRKSSKMQAFRIWDVNQKTFYLRNNQLVAGYLQGPNVNLEEKIDVVPIEPHALFLGIHGGKMCLSCVKSGDETRLQLEAVNITDLSENRKQDKRFAFIRSDSGPTTSFESAACPGWFLCTAMEADQPVSLTNMPDEGVMVTKFYFQEDEGGSPAGSPTSTEEGTSESATPESGPGTSTEPSEGSAPGSPAGSPTSTEEGTSTEPSEGSAPGTSTEPSEGSAPGTSESATPESGPGSEPATSGSETPGSEPATSGSETPGSPAGSPTSTEEGTSESATPESGPGTSTEPSEGSAPGTSTEPSEGSAPGSPAGSPTSTEEGTSTEPSEGSAPGTSTEPSEGSAPGTSESATPESGPGTSTEPSEGSAPGTSESATPESGPGSEPATSGSETPGTSTEPSEGSAPGTSTEPSEGSAPGTSESATPESGPGTSESATPESGPGSPAGSPTSTEEGTSESATPESGPGSEPATSGSETPGTSESATPESGPGTSTEPSEGSAPGTSTEPSEGSAPGTSTEPSEGSAPGTSTEPSEGSAPGTSTEPSEGSAPGTSTEPSEGSAPGSPAGSPTSTEEGTSTEPSEGSAPGTSESATPESGPGSEPATSGSETPGTSESATPESGPGSEPATSGSETPGTSESATPESGPGTSTEPSEGSAPGTSESATPESGPGSPAGSPTSTEEGSPAGSPTSTEEGSPAGSPTSTEEGTSESATPESGPGTSTEPSEGSAPGMDSDETGFEHSGLWVSVLAGLLLGACQAHPIPDSSPLLQFGGQVRQRYLYTDDAQQTEAHLEIREDGTVGGAADQSPESLLQLKALKPGVIQILGVKTSRFLCQRPDGALYGSLHFDPEACSFRELLLEDGYNVYQSEAHGLPLHLPGNKSPHRDPAPRGPARFLPLPGLPPALPEPPGILAPQPPDVGSSDPLSMVGPSQGRSPSYAS

SEQ ID NO: 1550 - protein, 765 aa, Artificial Sequence
  Description of Artificial Sequence: Synthetic polypeptide
MRPSGRKSSKMQAFRIWDVNQKTFYLRNNQLVAGYLQGPNVNLEEKIDVVPIEPHALFLGIHGGKMCLSCVKSGDETRLQLEAVNITDLSENRKQDKRFAFIRSDSGPTTSFESAACPGWFLCTAMEADQPVSLTNMPDEGVMVTKFYFQEDEGGSPAGSPTSTEEGTSESATPESGPGTSTEPSEGSAPGSPAGSPTSTEEGTSTEPSEGSAPGTSTEPSEGSAPGTSESATPESGPGSEPATSGSETPGSEPATSGSETPGSPAGSPTSTEEGTSESATPESGPGTSTEPSEGSAPGTSTEPSEGSAPGSPAGSPTSTEEGTSTEPSEGSAPGTSTEPSEGSAPGTSESATPESGPGTSTEPSEGSAPGTSESATPESGPGSEPATSGSETPGTSTEPSEGSAPGTSTEPSEGSAPGTSESATPESGPGTSESATPESGPGSPAGSPTSTEEGTSESATPESGPGSEPATSGSETPGTSESATPESGPGTSTEPSEGSAPGTSTEPSEGSAPGTSTEPSEGSAPGTSTEPSEGSAPGTSTEPSEGSAPGTSTEPSEGSAPGSPAGSPTSTEEGTSTEPSEGSAPGTSESATPESGPGSEPATSGSETPGTSESATPESGPGSEPATSGSETPGTSESATPESGPGTSTEPSEGSAPGTSESATPESGPGSPAGSPTSTEEGSPAGSPTSTEEGSPAGSPTSTEEGTSESATPESGPGTSTEPSEGSAPGQLGPQGPPHLVADPSKKQGPWLEEEEEAYGWMDF

SEQ ID NO: 1551 - protein, 753 aa, Artificial Sequence
  Description of Artificial Sequence: Synthetic polypeptide
MRPSGRKSSKMQAFRIWDVNQKTFYLRNNQLVAGYLQGPNVNLEEKIDVVPIEPHALFLGIHGGKMCLSCVKSGDETRLQLEAVNITDLSENRKQDKRFAFIRSDSGPTTSFESAACPGWFLCTAMEADQPVSLTNMPDEGVMVTKFYFQEDEGGSPAGSPTSTEEGTSESATPESGPGTSTEPSEGSAPGSPAGSPTSTEEGTSTEPSEGSAPGTSTEPSEGSAPGTSESATPESGPGSEPATSGSETPGSEPATSGSETPGSPAGSPTSTEEGTSESATPESGPGTSTEPSEGSAPGTSTEPSEGSAPGSPAGSPTSTEEGTSTEPSEGSAPGTSTEPSEGSAPGTSESATPESGPGTSTEPSEGSAPGTSESATPESGPGSEPATSGSETPGTSTEPSEGSAPGTSTEPSEGSAPGTSESATPESGPGTSESATPESGPGSPAGSPTSTEEGTSESATPESGPGSEPATSGSETPGTSESATPESGPGTSTEPSEGSAPGTSTEPSEGSAPGTSTEPSEGSAPGTSTEPSEGSAPGTSTEPSEGSAPGTSTEPSEGSAPGSPAGSPTSTEEGTSTEPSEGSAPGTSESATPESGPGSEPATSGSETPGTSESATPESGPGSEPATSGSETPGTSESATPESGPGTSTEPSEGSAPGTSESATPESGPGSPAGSPTSTEEGSPAGSPTSTEEGSPAGSPTSTEEGTSESATPESGPGTSTEPSEGSAPGDPSKKQGPWLEEEEEAYGWMDF

SEQ ID NO: 1552 - protein, 773 aa, Artificial Sequence
  Description of Artificial Sequence: Synthetic polypeptide
MRPSGRKSSKMQAFRIWDVNQKTFYLRNNQLVAGYLQGPNVNLEEKIDVVPIEPHALFLGIHGGKMCLSCVKSGDETRLQLEAVNITDLSENRKQDKRFAFIRSDSGPTTSFESAACPGWFLCTAMEADQPVSLTNMPDEGVMVTKFYFQEDEGGSPAGSPTSTEEGTSESATPESGPGTSTEPSEGSAPGSPAGSPTSTEEGTSTEPSEGSAPGTSTEPSEGSAPGTSESATPESGPGSEPATSGSETPGSEPATSGSETPGSPAGSPTSTEEGTSESATPESGPGTSTEPSEGSAPGTSTEPSEGSAPGSPAGSPTSTEEGTSTEPSEGSAPGTSTEPSEGSAPGTSESATPESGPGTSTEPSEGSAPGTSESATPESGPGSEPATSGSETPGTSTEPSEGSAPGTSTEPSEGSAPGTSESATPESGPGTSESATPESGPGSPAGSPTSTEEGTSESATPESGPGSEPATSGSETPGTSESATPESGPGTSTEPSEGSAPGTSTEPSEGSAPGTSTEPSEGSAPGTSTEPSEGSAPGTSTEPSEGSAPGTSTEPSEGSAPGSPAGSPTSTEEGTSTEPSEGSAPGTSESATPESGPGSEPATSGSETPGTSESATPESGPGSEPATSGSETPGTSESATPESGPGTSTEPSEGSAPGTSESATPESGPGSPAGSPTSTEEGSPAGSPTSTEEGSPAGSPTSTEEGTSESATPESGPGTSTEPSEGSAPGYAEGTFISDYSIAMDKIHQQDFVNWLLAQKGKKNDWKHNITQ

SEQ ID NO: 1553 - protein, 760 aa, Artificial Sequence
  Description of Artificial Sequence: Synthetic polypeptide
MRPSGRKSSKMQAFRIWDVNQKTFYLRNNQLVAGYLQGPNVNLEEKIDVVPIEPHALFLGIHGGKMCLSCVKSGDETRLQLEAVNITDLSENRKQDKRFAFIRSDSGPTTSFESAACPGWFLCTAMEADQPVSLTNMPDEGVMVTKFYFQEDEGGSPAGSPTSTEEGTSESATPESGPGTSTEPSEGSAPGSPAGSPTSTEEGTSTEPSEGSAPGTSTEPSEGSAPGTSESATPESGPGSEPATSGSETPGSEPATSGSETPGSPAGSPTSTEEGTSESATPESGPGTSTEPSEGSAPGTSTEPSEGSAPGSPAGSPTSTEEGTSTEPSEGSAPGTSTEPSEGSAPGTSESATPESGPGTSTEPSEGSAPGTSESATPESGPGSEPATSGSETPGTSTEPSEGSAPGTSTEPSEGSAPGTSESATPESGPGTSESATPESGPGSPAGSPTSTEEGTSESATPESGPGSEPATSGSETPGTSESATPESGPGTSTEPSEGSAPGTSTEPSEGSAPGTSTEPSEGSAPGTSTEPSEGSAPGTSTEPSEGSAPGTSTEPSEGSAPGSPAGSPTSTEEGTSTEPSEGSAPGTSESATPESGPGSEPATSGSETPGTSESATPESGPGSEPATSGSETPGTSESATPESGPGTSTEPSEGSAPGTSESATPESGPGSPAGSPTSTEEGSPAGSPTSTEEGSPAGSPTSTEEGTSESATPESGPGTSTEPSEGSAPGHSQGTFTSDYSKYLDSRRAQDFVQWLMNT

SEQ ID NO: 1554 - protein, 768 aa, Artificial Sequence
  Description of Artificial Sequence: Synthetic polypeptide
MRPSGRKSSKMQAFRIWDVNQKTFYLRNNQLVAGYLQGPNVNLEEKIDVVPIEPHALFLGIHGGKMCLSCVKSGDETRLQLEAVNITDLSENRKQDKRFAFIRSDSGPTTSFESAACPGWFLCTAMEADQPVSLTNMPDEGVMVTKFYFQEDEGGSPAGSPTSTEEGTSESATPESGPGTSTEPSEGSAPGSPAGSPTSTEEGTSTEPSEGSAPGTSTEPSEGSAPGTSESATPESGPGSEPATSGSETPGSEPATSGSETPGSPAGSPTSTEEGTSESATPESGPGTSTEPSEGSAPGTSTEPSEGSAPGSPAGSPTSTEEGTSTEPSEGSAPGTSTEPSEGSAPGTSESATPESGPGTSTEPSEGSAPGTSESATPESGPGSEPATSGSETPGTSTEPSEGSAPGTSTEPSEGSAPGTSESATPESGPGTSESATPESGPGSPAGSPTSTEEGTSESATPESGPGSEPATSGSETPGTSESATPESGPGTSTEPSEGSAPGTSTEPSEGSAPGTSTEPSEGSAPGTSTEPSEGSAPGTSTEPSEGSAPGTSTEPSEGSAPGSPAGSPTSTEEGTSTEPSEGSAPGTSESATPESGPGSEPATSGSETPGTSESATPESGPGSEPATSGSETPGTSESATPESGPGTSTEPSEGSAPGTSESATPESGPGSPAGSPTSTEEGSPAGSPTSTEEGSPAGSPTSTEEGTSESATPESGPGTSTEPSEGSAPGHDEFERHAEGTFTSDVSSTLEGQAALEFIAWLVKGRG

SEQ ID NO: 1555 - protein, 761 aa, Artificial Sequence
  Description of Artificial Sequence: Synthetic polypeptide
MRPSGRKSSKMQAFRIWDVNQKTFYLRNNQLVAGYLQGPNVNLEEKIDVVPIEPHALFLGIHGGKMCLSCVKSGDETRLQLEAVNITDLSENRKQDKRFAFIRSDSGPTTSFESAACPGWFLCTAMEADQPVSLTNMPDEGVMVTKFYFQEDEGGSPAGSPTSTEEGTSESATPESGPGTSTEPSEGSAPGSPAGSPTSTEEGTSTEPSEGSAPGTSTEPSEGSAPGTSESATPESGPGSEPATSGSETPGSEPATSGSETPGSPAGSPTSTEEGTSESATPESGPGTSTEPSEGSAPGTSTEPSEGSAPGSPAGSPTSTEEGTSTEPSEGSAPGTSTEPSEGSAPGTSESATPESGPGTSTEPSEGSAPGTSESATPESGPGSEPATSGSETPGTSTEPSEGSAPGTSTEPSEGSAPGTSESATPESGPGTSESATPESGPGSPAGSPTSTEEGTSESATPESGPGSEPATSGSETPGTSESATPESGPGTSTEPSEGSAPGTSTEPSEGSAPGTSTEPSEGSAPGTSTEPSEGSAPGTSTEPSEGSAPGTSTEPSEGSAPGSPAGSPTSTEEGTSTEPSEGSAPGTSESATPESGPGSEPATSGSETPGTSESATPESGPGSEPATSGSETPGTSESATPESGPGTSTEPSEGSAPGTSESATPESGPGSPAGSPTSTEEGSPAGSPTSTEEGSPAGSPTSTEEGTSESATPESGPGTSTEPSEGSAPGHAEGTFTSDVSSYLEGQAALEFIAWLVKGR

SEQ ID NO: 1556 - protein, 764 aa, Artificial Sequence
  Description of Artificial Sequence: Synthetic polypeptide
MRPSGRKSSKMQAFRIWDVNQKTFYLRNNQLVAGYLQGPNVNLEEKIDVVPIEPHALFLGIHGGKMCLSCVKSGDETRLQLEAVNITDLSENRKQDKRFAFIRSDSGPTTSFESAACPGWFLCTAMEADQPVSLTNMPDEGVMVTKFYFQEDEGGSPAGSPTSTEEGTSESATPESGPGTSTEPSEGSAPGSPAGSPTSTEEGTSTEPSEGSAPGTSTEPSEGSAPGTSESATPESGPGSEPATSGSETPGSEPATSGSETPGSPAGSPTSTEEGTSESATPESGPGTSTEPSEGSAPGTSTEPSEGSAPGSPAGSPTSTEEGTSTEPSEGSAPGTSTEPSEGSAPGTSESATPESGPGTSTEPSEGSAPGTSESATPESGPGSEPATSGSETPGTSTEPSEGSAPGTSTEPSEGSAPGTSESATPESGPGTSESATPESGPGSPAGSPTSTEEGTSESATPESGPGSEPATSGSETPGTSESATPESGPGTSTEPSEGSAPGTSTEPSEGSAPGTSTEPSEGSAPGTSTEPSEGSAPGTSTEPSEGSAPGTSTEPSEGSAPGSPAGSPTSTEEGTSTEPSEGSAPGTSESATPESGPGSEPATSGSETPGTSESATPESGPGSEPATSGSETPGTSESATPESGPGTSTEPSEGSAPGTSESATPESGPGSPAGSPTSTEEGSPAGSPTSTEEGSPAGSPTSTEEGTSESATPESGPGTSTEPSEGSAPGHADGSFSDEMNTILDNLAARDFINWLIETKITD

SEQ ID NO: 1557 - protein, 801 aa, Artificial Sequence
  Description of Artificial Sequence: Synthetic polypeptide
MRPSGRKSSKMQAFRIWDVNQKTFYLRNNQLVAGYLQGPNVNLEEKIDVVPIEPHALFLGIHGGKMCLSCVKSGDETRLQLEAVNITDLSENRKQDKRFAFIRSDSGPTTSFESAACPGWFLCTAMEADQPVSLTNMPDEGVMVTKFYFQEDEGGSPAGSPTSTEEGTSESATPESGPGTSTEPSEGSAPGSPAGSPTSTEEGTSTEPSEGSAPGTSTEPSEGSAPGTSESATPESGPGSEPATSGSETPGSEPATSGSETPGSPAGSPTSTEEGTSESATPESGPGTSTEPSEGSAPGTSTEPSEGSAPGSPAGSPTSTEEGTSTEPSEGSAPGTSTEPSEGSAPGTSESATPESGPGTSTEPSEGSAPGTSESATPESGPGSEPATSGSETPGTSTEPSEGSAPGTSTEPSEGSAPGTSESATPESGPGTSESATPESGPGSPAGSPTSTEEGTSESATPESGPGSEPATSGSETPGTSESATPESGPGTSTEPSEGSAPGTSTEPSEGSAPGTSTEPSEGSAPGTSTEPSEGSAPGTSTEPSEGSAPGTSTEPSEGSAPGSPAGSPTSTEEGTSTEPSEGSAPGTSESATPESGPGSEPATSGSETPGTSESATPESGPGSEPATSGSETPGTSESATPESGPGTSTEPSEGSAPGTSESATPESGPGSPAGSPTSTEEGSPAGSPTSTEEGSPAGSPTSTEEGTSESATPESGPGTSTEPSEGSAPGGPETLCGAELVDALQFVCGDRGFYFNKPTGYGSSSRRAPQTGIVDECCFRSCDLRRLEMYCAPLKPAKSA

SEQ ID NO: 1558 - protein, 798 aa, Artificial Sequence
  Description of Artificial Sequence: Synthetic polypeptide
MRPSGRKSSKMQAFRIWDVNQKTFYLRNNQLVAGYLQGPNVNLEEKIDVVPIEPHALFLGIHGGKMCLSCVKSGDETRLQLEAVNITDLSENRKQDKRFAFIRSDSGPTTSFESAACPGWFLCTAMEADQPVSLTNMPDEGVMVTKFYFQEDEGGSPAGSPTSTEEGTSESATPESGPGTSTEPSEGSAPGSPAGSPTSTEEGTSTEPSEGSAPGTSTEPSEGSAPGTSESATPESGPGSEPATSGSETPGSEPATSGSETPGSPAGSPTSTEEGTSESATPESGPGTSTEPSEGSAPGTSTEPSEGSAPGSPAGSPTSTEEGTSTEPSEGSAPGTSTEPSEGSAPGTSESATPESGPGTSTEPSEGSAPGTSESATPESGPGSEPATSGSETPGTSTEPSEGSAPGTSTEPSEGSAPGTSESATPESGPGTSESATPESGPGSPAGSPTSTEEGTSESATPESGPGSEPATSGSETPGTSESATPESGPGTSTEPSEGSAPGTSTEPSEGSAPGTSTEPSEGSAPGTSTEPSEGSAPGTSTEPSEGSAPGTSTEPSEGSAPGSPAGSPTSTEEGTSTEPSEGSAPGTSESATPESGPGSEPATSGSETPGTSESATPESGPGSEPATSGSETPGTSESATPESGPGTSTEPSEGSAPGTSESATPESGPGSPAGSPTSTEEGSPAGSPTSTEEGSPAGSPTSTEEGTSESATPESGPGTSTEPSEGSAPGAYRPSETLCGGELVDTLQFVCGDRGFYFSRPASRVSRRSRGIVEECCFRSCDLALLETYCATPAKSE

SEQ ID NO: 1559 - protein, 880 aa, Artificial Sequence
  Description of Artificial Sequence: Synthetic polypeptide
MRPSGRKSSKMQAFRIWDVNQKTFYLRNNQLVAGYLQGPNVNLEEKIDVVPIEPHALFLGIHGGKMCLSCVKSGDETRLQLEAVNITDLSENRKQDKRFAFIRSDSGPTTSFESAACPGWFLCTAMEADQPVSLTNMPDEGVMVTKFYFQEDEGGSPAGSPTSTEEGTSESATPESGPGTSTEPSEGSAPGSPAGSPTSTEEGTSTEPSEGSAPGTSTEPSEGSAPGTSESATPESGPGSEPATSGSETPGSEPATSGSETPGSPAGSPTSTEEGTSESATPESGPGTSTEPSEGSAPGTSTEPSEGSAPGSPAGSPTSTEEGTSTEPSEGSAPGTSTEPSEGSAPGTSESATPESGPGTSTEPSEGSAPGTSESATPESGPGSEPATSGSETPGTSTEPSEGSAPGTSTEPSEGSAPGTSESATPESGPGTSESATPESGPGSPAGSPTSTEEGTSESATPESGPGSEPATSGSETPGTSESATPESGPGTSTEPSEGSAPGTSTEPSEGSAPGTSTEPSEGSAPGTSTEPSEGSAPGTSTEPSEGSAPGTSTEPSEGSAPGSPAGSPTSTEEGTSTEPSEGSAPGTSESATPESGPGSEPATSGSETPGTSESATPESGPGSEPATSGSETPGTSESATPESGPGTSTEPSEGSAPGTSESATPESGPGSPAGSPTSTEEGSPAGSPTSTEEGSPAGSPTSTEEGTSESATPESGPGTSTEPSEGSAPGEESQKKLPSSRITCPQGSVAYGSYCYSLILIPQTWSNAELSCQMHFSGHLAFLLSTGEITFVSSLVKNSLTAYQYIWIGLHDPSHGTLPNGSGWKWSSSNVLTFYNWERNPSIAADRGYCAVLSQKSGFQKWRDFNCENELPYICKFKV

SEQ ID NO: 1560 - protein, 778 aa, Artificial Sequence
  Description of Artificial Sequence: Synthetic polypeptide
MRPSGRKSSKMQAFRIWDVNQKTFYLRNNQLVAGYLQGPNVNLEEKIDVVPIEPHALFLGIHGGKMCLSCVKSGDETRLQLEAVNITDLSENRKQDKRFAFIRSDSGPTTSFESAACPGWFLCTAMEADQPVSLTNMPDEGVMVTKFYFQEDEGGSPAGSPTSTEEGTSESATPESGPGTSTEPSEGSAPGSPAGSPTSTEEGTSTEPSEGSAPGTSTEPSEGSAPGTSESATPESGPGSEPATSGSETPGSEPATSGSETPGSPAGSPTSTEEGTSESATPESGPGTSTEPSEGSAPGTSTEPSEGSAPGSPAGSPTSTEEGTSTEPSEGSAPGTSTEPSEGSAPGTSESATPESGPGTSTEPSEGSAPGTSESATPESGPGSEPATSGSETPGTSTEPSEGSAPGTSTEPSEGSAPGTSESATPESGPGTSESATPESGPGSPAGSPTSTEEGTSESATPESGPGSEPATSGSETPGTSESATPESGPGTSTEPSEGSAPGTSTEPSEGSAPGTSTEPSEGSAPGTSTEPSEGSAPGTSTEPSEGSAPGTSTEPSEGSAPGSPAGSPTSTEEGTSTEPSEGSAPGTSESATPESGPGSEPATSGSETPGTSESATPESGPGSEPATSGSETPGTSESATPESGPGTSTEPSEGSAPGTSESATPESGPGSPAGSPTSTEEGSPAGSPTSTEEGSPAGSPTSTEEGTSESATPESGPGTSTEPSEGSAPGTQAQLLRVGCVLGTCQVQNLSHRLWQLMGPAGRQDSAPVDPSSPHSY

SEQ ID NO: 1561 - protein, 877 aa, Artificial Sequence
  Description of Artificial Sequence: Synthetic polypeptide
MRPSGRKSSKMQAFRIWDVNQKTFYLRNNQLVAGYLQGPNVNLEEKIDVVPIEPHALFLGIHGGKMCLSCVKSGDETRLQLEAVNITDLSENRKQDKRFAFIRSDSGPTTSFESAACPGWFLCTAMEADQPVSLTNMPDEGVMVTKFYFQEDEGGSPAGSPTSTEEGTSESATPESGPGTSTEPSEGSAPGSPAGSPTSTEEGTSTEPSEGSAPGTSTEPSEGSAPGTSESATPESGPGSEPATSGSETPGSEPATSGSETPGSPAGSPTSTEEGTSESATPESGPGTSTEPSEGSAPGTSTEPSEGSAPGSPAGSPTSTEEGTSTEPSEGSAPGTSTEPSEGSAPGTSESATPESGPGTSTEPSEGSAPGTSESATPESGPGSEPATSGSETPGTSTEPSEGSAPGTSTEPSEGSAPGTSESATPESGPGTSESATPESGPGSPAGSPTSTEEGTSESATPESGPGSEPATSGSETPGTSESATPESGPGTSTEPSEGSAPGTSTEPSEGSAPGTSTEPSEGSAPGTSTEPSEGSAPGTSTEPSEGSAPGTSTEPSEGSAPGSPAGSPTSTEEGTSTEPSEGSAPGTSESATPESGPGSEPATSGSETPGTSESATPESGPGSEPATSGSETPGTSESATPESGPGTSTEPSEGSAPGTSESATPESGPGSPAGSPTSTEEGSPAGSPTSTEEGSPAGSPTSTEEGTSESATPESGPGTSTEPSEGSAPGVPIQKVQDDTKTLIKTIVTRINDISHTQSVSSKQKVTGLDFIPGLHPILTLSKMDQTLAVYQQILTSMPSRNVIQISNDLENLRDLLHVLAFSKSCHLPWASGLETLDSLGGVLEASGYSTEVVALSRLQGSLQDMLWQLDLSPGC

SEQ ID NO: 1562 - protein, 756 aa, Artificial Sequence
  Description of Artificial Sequence: Synthetic polypeptide
MRPSGRKSSKMQAFRIWDVNQKTFYLRNNQLVAGYLQGPNVNLEEKIDVVPIEPHALFLGIHGGKMCLSCVKSGDETRLQLEAVNITDLSENRKQDKRFAFIRSDSGPTTSFESAACPGWFLCTAMEADQPVSLTNMPDEGVMVTKFYFQEDEGGSPAGSPTSTEEGTSESATPESGPGTSTEPSEGSAPGSPAGSPTSTEEGTSTEPSEGSAPGTSTEPSEGSAPGTSESATPESGPGSEPATSGSETPGSEPATSGSETPGSPAGSPTSTEEGTSESATPESGPGTSTEPSEGSAPGTSTEPSEGSAPGSPAGSPTSTEEGTSTEPSEGSAPGTSTEPSEGSAPGTSESATPESGPGTSTEPSEGSAPGTSESATPESGPGSEPATSGSETPGTSTEPSEGSAPGTSTEPSEGSAPGTSESATPESGPGTSESATPESGPGSPAGSPTSTEEGTSESATPESGPGSEPATSGSETPGTSESATPESGPGTSTEPSEGSAPGTSTEPSEGSAPGTSTEPSEGSAPGTSTEPSEGSAPGTSTEPSEGSAPGTSTEPSEGSAPGSPAGSPTSTEEGTSTEPSEGSAPGTSESATPESGPGSEPATSGSETPGTSESATPESGPGSEPATSGSETPGTSESATPESGPGTSTEPSEGSAPGTSESATPESGPGSPAGSPTSTEEGSPAGSPTSTEEGSPAGSPTSTEEGTSESATPESGPGTSTEPSEGSAPGFRVDEEFQSPFASQSRGYFLFRPRN

SEQ ID NO: 1563 - protein, 768 aa, Artificial Sequence
  Description of Artificial Sequence: Synthetic polypeptide
MRPSGRKSSKMQAFRIWDVNQKTFYLRNNQLVAGYLQGPNVNLEEKIDVVPIEPHALFLGIHGGKMCLSCVKSGDETRLQLEAVNITDLSENRKQDKRFAFIRSDSGPTTSFESAACPGWFLCTAMEADQPVSLTNMPDEGVMVTKFYFQEDEGGSPAGSPTSTEEGTSESATPESGPGTSTEPSEGSAPGSPAGSPTSTEEGTSTEPSEGSAPGTSTEPSEGSAPGTSESATPESGPGSEPATSGSETPGSEPATSGSETPGSPAGSPTSTEEGTSESATPESGPGTSTEPSEGSAPGTSTEPSEGSAPGSPAGSPTSTEEGTSTEPSEGSAPGTSTEPSEGSAPGTSESATPESGPGTSTEPSEGSAPGTSESATPESGPGSEPATSGSETPGTSTEPSEGSAPGTSTEPSEGSAPGTSESATPESGPGTSESATPESGPGSPAGSPTSTEEGTSESATPESGPGSEPATSGSETPGTSESATPESGPGTSTEPSEGSAPGTSTEPSEGSAPGTSTEPSEGSAPGTSTEPSEGSAPGTSTEPSEGSAPGTSTEPSEGSAPGSPAGSPTSTEEGTSTEPSEGSAPGTSESATPESGPGSEPATSGSETPGTSESATPESGPGSEPATSGSETPGTSESATPESGPGTSTEPSEGSAPGTSESATPESGPGSPAGSPTSTEEGSPAGSPTSTEEGSPAGSPTSTEEGTSESATPESGPGTSTEPSEGSAPGHSQGTFTSDYSKYLDSRRAQDFVQWLMNTKRNRNNIA

SEQ ID NO: 1564 - protein, 768 aa, Artificial Sequence
  Description of Artificial Sequence: Synthetic polypeptide
MRPSGRKSSKMQAFRIWDVNQKTFYLRNNQLVAGYLQGPNVNLEEKIDVVPIEPHALFLGIHGGKMCLSCVKSGDETRLQLEAVNITDLSENRKQDKRFAFIRSDSGPTTSFESAACPGWFLCTAMEADQPVSLTNMPDEGVMVTKFYFQEDEGGSPAGSPTSTEEGTSESATPESGPGTSTEPSEGSAPGSPAGSPTSTEEGTSTEPSEGSAPGTSTEPSEGSAPGTSESATPESGPGSEPATSGSETPGSEPATSGSETPGSPAGSPTSTEEGTSESATPESGPGTSTEPSEGSAPGTSTEPSEGSAPGSPAGSPTSTEEGTSTEPSEGSAPGTSTEPSEGSAPGTSESATPESGPGTSTEPSEGSAPGTSESATPESGPGSEPATSGSETPGTSTEPSEGSAPGTSTEPSEGSAPGTSESATPESGPGTSESATPESGPGSPAGSPTSTEEGTSESATPESGPGSEPATSGSETPGTSESATPESGPGTSTEPSEGSAPGTSTEPSEGSAPGTSTEPSEGSAPGTSTEPSEGSAPGTSTEPSEGSAPGTSTEPSEGSAPGSPAGSPTSTEEGTSTEPSEGSAPGTSESATPESGPGSEPATSGSETPGTSESATPESGPGSEPATSGSETPGTSESATPESGPGTSTEPSEGSAPGTSESATPESGPGSPAGSPTSTEEGSPAGSPTSTEEGSPAGSPTSTEEGTSESATPESGPGTSTEPSEGSAPGKCNTATCATNRLANFLVHSSNNFGPILPPTNVGSNTY

SEQ ID NO: 1565 - protein, 767 aa, Artificial Sequence
  Description of Artificial Sequence: Synthetic polypeptide
MRPSGRKSSKMQAFRIWDVNQKTFYLRNNQLVAGYLQGPNVNLEEKIDVVPIEPHALFLGIHGGKMCLSCVKSGDETRLQLEAVNITDLSENRKQDKRFAFIRSDSGPTTSFESAACPGWFLCTAMEADQPVSLTNMPDEGVMVTKFYFQEDEGGSPAGSPTSTEEGTSESATPESGPGTSTEPSEGSAPGSPAGSPTSTEEGTSTEPSEGSAPGTSTEPSEGSAPGTSESATPESGPGSEPATSGSETPGSEPATSGSETPGSPAGSPTSTEEGTSESATPESGPGTSTEPSEGSAPGTSTEPSEGSAPGSPAGSPTSTEEGTSTEPSEGSAPGTSTEPSEGSAPGTSESATPESGPGTSTEPSEGSAPGTSESATPESGPGSEPATSGSETPGTSTEPSEGSAPGTSTEPSEGSAPGTSESATPESGPGTSESATPESGPGSPAGSPTSTEEGTSESATPESGPGSEPATSGSETPGTSESATPESGPGTSTEPSEGSAPGTSTEPSEGSAPGTSTEPSEGSAPGTSTEPSEGSAPGTSTEPSEGSAPGTSTEPSEGSAPGSPAGSPTSTEEGTSTEPSEGSAPGTSESATPESGPGSEPATSGSETPGTSESATPESGPGSEPATSGSETPGTSESATPESGPGTSTEPSEGSAPGTSESATPESGPGSPAGSPTSTEEGSPAGSPTSTEEGSPAGSPTSTEEGTSESATPESGPGTSTEPSEGSAPGYPIKPEAPGEDASPEELNRYYASLRHYLNLVTRQRY

SEQ ID NO: 1566 - protein, 772 aa, Artificial Sequence
  Description of Artificial Sequence: Synthetic polypeptide
MRPSGRKSSKMQAFRIWDVNQKTFYLRNNQLVAGYLQGPNVNLEEKIDVVPIEPHALFLGIHGGKMCLSCVKSGDETRLQLEAVNITDLSENRKQDKRFAFIRSDSGPTTSFESAACPGWFLCTAMEADQPVSLTNMPDEGVMVTKFYFQEDEGGSPAGSPTSTEEGTSESATPESGPGTSTEPSEGSAPGSPAGSPTSTEEGTSTEPSEGSAPGTSTEPSEGSAPGTSESATPESGPGSEPATSGSETPGSEPATSGSETPGSPAGSPTSTEEGTSESATPESGPGTSTEPSEGSAPGTSTEPSEGSAPGSPAGSPTSTEEGTSTEPSEGSAPGTSTEPSEGSAPGTSESATPESGPGTSTEPSEGSAPGTSESATPESGPGSEPATSGSETPGTSTEPSEGSAPGTSTEPSEGSAPGTSESATPESGPGTSESATPESGPGSPAGSPTSTEEGTSESATPESGPGSEPATSGSETPGTSESATPESGPGTSTEPSEGSAPGTSTEPSEGSAPGTSTEPSEGSAPGTSTEPSEGSAPGTSTEPSEGSAPGTSTEPSEGSAPGSPAGSPTSTEEGTSTEPSEGSAPGTSESATPESGPGSEPATSGSETPGTSESATPESGPGSEPATSGSETPGTSESATPESGPGTSTEPSEGSAPGTSESATPESGPGSPAGSPTSTEEGSPAGSPTSTEEGSPAGSPTSTEEGTSESATPESGPGTSTEPSEGSAPGIVLSLDVPIGLLQILLEQARARAAREQATTNARILARVGHC

SEQ ID NO: 1567 - protein, 769 aa, Artificial Sequence
  Description of Artificial Sequence: Synthetic polypeptide
MRPSGRKSSKMQAFRIWDVNQKTFYLRNNQLVAGYLQGPNVNLEEKIDVVPIEPHALFLGIHGGKMCLSCVKSGDETRLQLEAVNITDLSENRKQDKRFAFIRSDSGPTTSFESAACPGWFLCTAMEADQPVSLTNMPDEGVMVTKFYFQEDEGGSPAGSPTSTEEGTSESATPESGPGTSTEPSEGSAPGSPAGSPTSTEEGTSTEPSEGSAPGTSTEPSEGSAPGTSESATPESGPGSEPATSGSETPGSEPATSGSETPGSPAGSPTSTEEGTSESATPESGPGTSTEPSEGSAPGTSTEPSEGSAPGSPAGSPTSTEEGTSTEPSEGSAPGTSTEPSEGSAPGTSESATPESGPGTSTEPSEGSAPGTSESATPESGPGSEPATSGSETPGTSTEPSEGSAPGTSTEPSEGSAPGTSESATPESGPGTSESATPESGPGSPAGSPTSTEEGTSESATPESGPGSEPATSGSETPGTSESATPESGPGTSTEPSEGSAPGTSTEPSEGSAPGTSTEPSEGSAPGTSTEPSEGSAPGTSTEPSEGSAPGTSTEPSEGSAPGSPAGSPTSTEEGTSTEPSEGSAPGTSESATPESGPGSEPATSGSETPGTSESATPESGPGSEPATSGSETPGTSESATPESGPGTSTEPSEGSAPGTSESATPESGPGSPAGSPTSTEEGSPAGSPTSTEEGSPAGSPTSTEEGTSESATPESGPGTSTEPSEGSAPGFTLSLDVPTNIMNLLFNIAKAKNLRAQAAANAHLMAQI

SEQ ID NO: 1568 - protein, 763 aa, Artificial Sequence
  Description of Artificial Sequence: Synthetic polypeptide
CGNLSTCMLGTYTQDFNKFHTFPQTAIGVGAPGGSPAGSPTSTEEGTSESATPESGPGTSTEPSEGSAPGSPAGSPTSTEEGTSTEPSEGSAPGTSTEPSEGSAPGTSESATPESGPGSEPATSGSETPGSEPATSGSETPGSPAGSPTSTEEGTSESATPESGPGTSTEPSEGSAPGTSTEPSEGSAPGSPAGSPTSTEEGTSTEPSEGSAPGTSTEPSEGSAPGTSESATPESGPGTSTEPSEGSAPGTSESATPESGPGSEPATSGSETPGTSTEPSEGSAPGTSTEPSEGSAPGTSESATPESGPGTSESATPESGPGSPAGSPTSTEEGTSESATPESGPGSEPATSGSETPGTSESATPESGPGTSTEPSEGSAPGTSTEPSEGSAPGTSTEPSEGSAPGTSTEPSEGSAPGTSTEPSEGSAPGTSTEPSEGSAPGSPAGSPTSTEEGTSTEPSEGSAPGTSESATPESGPGSEPATSGSETPGTSESATPESGPGSEPATSGSETPGTSESATPESGPGTSTEPSEGSAPGTSESATPESGPGSPAGSPTSTEEGSPAGSPTSTEEGSPAGSPTSTEEGTSESATPESGPGTSTEPSEGSAPGMRPSGRKSSKMQAFRIWDVNQKTFYLRNNQLVAGYLQGPNVNLEEKIDVVPIEPHALFLGIHGGKMCLSCVKSGDETRLQLEAVNITDLSENRKQDKRFAFIRSDSGPTTSFESAACPGWFLCTAMEADQPVSLTNMPDEGVMVTKFYFQEDE

SEQ ID NO: 1569 - protein, 767 aa, Artificial Sequence
  Description of Artificial Sequence: Synthetic polypeptide
ACDTATCVTHRLAGLLSRSGGVVKNMVPTNVGSKAFGGSPAGSPTSTEEGTSESATPESGPGTSTEPSEGSAPGSPAGSPTSTEEGTSTEPSEGSAPGTSTEPSEGSAPGTSESATPESGPGSEPATSGSETPGSEPATSGSETPGSPAGSPTSTEEGTSESATPESGPGTSTEPSEGSAPGTSTEPSEGSAPGSPAGSPTSTEEGTSTEPSEGSAPGTSTEPSEGSAPGTSESATPESGPGTSTEPSEGSAPGTSESATPESGPGSEPATSGSETPGTSTEPSEGSAPGTSTEPSEGSAPGTSESATPESGPGTSESATPESGPGSPAGSPTSTEEGTSESATPESGPGSEPATSGSETPGTSESATPESGPGTSTEPSEGSAPGTSTEPSEGSAPGTSTEPSEGSAPGTSTEPSEGSAPGTSTEPSEGSAPGTSTEPSEGSAPGSPAGSPTSTEEGTSTEPSEGSAPGTSESATPESGPGSEPATSGSETPGTSESATPESGPGSEPATSGSETPGTSESATPESGPGTSTEPSEGSAPGTSESATPESGPGSPAGSPTSTEEGSPAGSPTSTEEGSPAGSPTSTEEGTSESATPESGPGTSTEPSEGSAPGMRPSGRKSSKMQAFRIWDVNQKTFYLRNNQLVAGYLQGPNVNLEEKIDVVPIEPHALFLGIHGGKMCLSCVKSGDETRLQLEAVNITDLSENRKQDKRFAFIRSDSGPTTSFESAACPGWFLCTAMEADQPVSLTNMPDEGVMVTKFYFQEDE

SEQ ID NO: 1570 - protein, 764 aa, Artificial Sequence
  Description of Artificial Sequence: Synthetic polypeptide
KAPSGRMSIVKNLQNLDPSHRISDRDYMGWMDFGGSPAGSPTSTEEGTSESATPESGPGTSTEPSEGSAPGSPAGSPTSTEEGTSTEPSEGSAPGTSTEPSEGSAPGTSESATPESGPGSEPATSGSETPGSEPATSGSETPGSPAGSPTSTEEGTSESATPESGPGTSTEPSEGSAPGTSTEPSEGSAPGSPAGSPTSTEEGTSTEPSEGSAPGTSTEPSEGSAPGTSESATPESGPGTSTEPSEGSAPGTSESATPESGPGSEPATSGSETPGTSTEPSEGSAPGTSTEPSEGSAPGTSESATPESGPGTSESATPESGPGSPAGSPTSTEEGTSESATPESGPGSEPATSGSETPGTSESATPESGPGTSTEPSEGSAPGTSTEPSEGSAPGTSTEPSEGSAPGTSTEPSEGSAPGTSTEPSEGSAPGTSTEPSEGSAPGSPAGSPTSTEEGTSTEPSEGSAPGTSESATPESGPGSEPATSGSETPGTSESATPESGPGSEPATSGSETPGTSESATPESGPGTSTEPSEGSAPGTSESATPESGPGSPAGSPTSTEEGSPAGSPTSTEEGSPAGSPTSTEEGTSESATPESGPGTSTEPSEGSAPGMRPSGRKSSKMQAFRIWDVNQKTFYLRNNQLVAGYLQGPNVNLEEKIDVVPIEPHALFLGIHGGKMCLSCVKSGDETRLQLEAVNITDLSENRKQDKRFAFIRSDSGPTTSFESAACPGWFLCTAMEADQPVSLTNMPDEGVMVTKFYFQEDE

SEQ ID NO: 1571 - protein, 739 aa, Artificial Sequence
  Description of Artificial Sequence: Synthetic polypeptide
DYMGWMDFGGSPAGSPTSTEEGTSESATPESGPGTSTEPSEGSAPGSPAGSPTSTEEGTSTEPSEGSAPGTSTEPSEGSAPGTSESATPESGPGSEPATSGSETPGSEPATSGSETPGSPAGSPTSTEEGTSESATPESGPGTSTEPSEGSAPGTSTEPSEGSAPGSPAGSPTSTEEGTSTEPSEGSAPGTSTEPSEGSAPGTSESATPESGPGTSTEPSEGSAPGTSESATPESGPGSEPATSGSETPGTSTEPSEGSAPGTSTEPSEGSAPGTSESATPESGPGTSESATPESGPGSPAGSPTSTEEGTSESATPESGPGSEPATSGSETPGTSESATPESGPGTSTEPSEGSAPGTSTEPSEGSAPGTSTEPSEGSAPGTSTEPSEGSAPGTSTEPSEGSAPGTSTEPSEGSAPGSPAGSPTSTEEGTSTEPSEGSAPGTSESATPESGPGSEPATSGSETPGTSESATPESGPGSEPATSGSETPGTSESATPESGPGTSTEPSEGSAPGTSESATPESGPGSPAGSPTSTEEGSPAGSPTSTEEGSPAGSPTSTEEGTSESATPESGPGTSTEPSEGSAPGMRPSGRKSSKMQAFRIWDVNQKTFYLRNNQLVAGYLQGPNVNLEEKIDVVPIEPHALFLGIHGGKMCLSCVKSGDETRLQLEAVNITDLSENRKQDKRFAFIRSDSGPTTSFESAACPGWFLCTAMEADQPVSLTNMPDEGVMVTKFYFQEDE

SEQ ID NO: 1572 - protein, 770 aa, Artificial Sequence
  Description of Artificial Sequence: Synthetic polypeptide
HSDGTFTSDLSKQMEEEAVRLFIEWLKNGGPSSGAPPPSGGSPAGSPTSTEEGTSESATPESGPGTSTEPSEGSAPGSPAGSPTSTEEGTSTEPSEGSAPGTSTEPSEGSAPGTSESATPESGPGSEPATSGSETPGSEPATSGSETPGSPAGSPTSTEEGTSESATPESGPGTSTEPSEGSAPGTSTEPSEGSAPGSPAGSPTSTEEGTSTEPSEGSAPGTSTEPSEGSAPGTSESATPESGPGTSTEPSEGSAPGTSESATPESGPGSEPATSGSETPGTSTEPSEGSAPGTSTEPSEGSAPGTSESATPESGPGTSESATPESGPGSPAGSPTSTEEGTSESATPESGPGSEPATSGSETPGTSESATPESGPGTSTEPSEGSAPGTSTEPSEGSAPGTSTEPSEGSAPGTSTEPSEGSAPGTSTEPSEGSAPGTSTEPSEGSAPGSPAGSPTSTEEGTSTEPSEGSAPGTSESATPESGPGSEPATSGSETPGTSESATPESGPGSEPATSGSETPGTSESATPESGPGTSTEPSEGSAPGTSESATPESGPGSPAGSPTSTEEGSPAGSPTSTEEGSPAGSPTSTEEGTSESATPESGPGTSTEPSEGSAPGMRPSGRKSSKMQAFRIWDVNQKTFYLRNNQLVAGYLQGPNVNLEEKIDVVPIEPHALFLGIHGGKMCLSCVKSGDETRLQLEAVNITDLSENRKQDKRFAFIRSDSGPTTSFESAACPGWFLCTAMEADQPVSLTNMPDEGVMVTKFYFQEDE

SEQ ID NO: 1573 - protein, 770 aa, Artificial Sequence
  Description of Artificial Sequence: Synthetic polypeptide
HGEGTFTSDLSKQMEEEAVRLFIEWLKNGGPSSGAPPPSGGSPAGSPTSTEEGTSESATPESGPGTSTEPSEGSAPGSPAGSPTSTEEGTSTEPSEGSAPGTSTEPSEGSAPGTSESATPESGPGSEPATSGSETPGSEPATSGSETPGSPAGSPTSTEEGTSESATPESGPGTSTEPSEGSAPGTSTEPSEGSAPGSPAGSPTSTEEGTSTEPSEGSAPGTSTEPSEGSAPGTSESATPESGPGTSTEPSEGSAPGTSESATPESGPGSEPATSGSETPGTSTEPSEGSAPGTSTEPSEGSAPGTSESATPESGPGTSESATPESGPGSPAGSPTSTEEGTSESATPESGPGSEPATSGSETPGTSESATPESGPGTSTEPSEGSAPGTSTEPSEGSAPGTSTEPSEGSAPGTSTEPSEGSAPGTSTEPSEGSAPGTSTEPSEGSAPGSPAGSPTSTEEGTSTEPSEGSAPGTSESATPESGPGSEPATSGSETPGTSESATPESGPGSEPATSGSETPGTSESATPESGPGTSTEPSEGSAPGTSESATPESGPGSPAGSPTSTEEGSPAGSPTSTEEGSPAGSPTSTEEGTSESATPESGPGTSTEPSEGSAPGMRPSGRKSSKMQAFRIWDVNQKTFYLRNNQLVAGYLQGPNVNLEEKIDVVPIEPHALFLGIHGGKMCLSCVKSGDETRLQLEAVNITDLSENRKQDKRFAFIRSDSGPTTSFESAACPGWFLCTAMEADQPVSLTNMPDEGVMVTKFYFQEDE

SEQ ID NO: 1574 - protein, 942 aa, Artificial Sequence
  Description of Artificial Sequence: Synthetic polypeptide
HGEGTFTSDLSKQMEEEAVRLFIEWLKNGGPSSGAPPPSGGSPAGSPTSTEEGTSESATPESGPGTSTEPSEGSAPGSPAGSPTSTEEGTSTEPSEGSAPGTSTEPSEGSAPGTSESATPESGPGSEPATSGSETPGSEPATSGSETPGSPAGSPTSTEEGTSESATPESGPGTSTEPSEGSAPGTSTEPSEGSAPGSPAGSPTSTEEGTSTEPSEGSAPGTSTEPSEGSAPGTSESATPESGPGTSTEPSEGSAPGTSESATPESGPGSEPATSGSETPGTSTEPSEGSAPGTSTEPSEGSAPGTSESATPESGPGTSESATPESGPGSPAGSPTSTEEGTSESATPESGPGSEPATSGSETPGTSESATPESGPGTSTEPSEGSAPGTSTEPSEGSAPGTSTEPSEGSAPGTSTEPSEGSAPGTSTEPSEGSAPGTSTEPSEGSAPGSPAGSPTSTEEGTSTEPSEGSAPGTSESATPESGPGSEPATSGSETPGTSESATPESGPGSEPATSGSETPGTSESATPESGPGTSTEPSEGSAPGTSESATPESGPGSPAGSPTSTEEGSPAGSPTSTEEGSPAGSPTSTEEGTSESATPESGPGTSTEPSEGSAPGTSESATPESGPGSEPATSGSETPGTSESATPESGPGSEPATSGSETPGTSESATPESGPGTSTEPSEGSAPGSPAGSPTSTEEGTSESATPESGPGSEPATSGSETPGTSESATPESGPGSPAGSPTSTEEGSPAGSPTSTEEGTSTEPSEGSAPGTSESATPESGPGTSESATPESGPGTSESATPESGPGSEPATSGSETPGSEPATSGSETPGSPAGSPTSTEEGTSTEPSEGSAPGTSTEPSEGSAPGSEPATSGSETPGTSESATPESGPGTSTEPSEGSAPGKCNTATCATQRLANFLVHSSNNFGAILSSTNVGSNTY

SEQ ID NO: 1575 - protein, 947 aa, Artificial Sequence
  Description of Artificial Sequence: Synthetic polypeptide
MRSGCVVVHVWILAGLWLAVAGRPLAFSDAGPHVHYGWGDPIRLRHLYTSGPHGLSSCFLRIRADGVVDCARGQSAHSLLEIKAVALRTVAIKGVHSVRYLCMGADGKMQGLLQYSEEDCAFEEEIRPDGYNVYRSEKHRLPVSLSSAKQRQLYKNRGFLPLSHFLPMLPMVPEEPEDLRGHLESDMFSSPLETDSMDPFGLVTGLEAVRSPSFEKGGSPAGSPTSTEEGTSESATPESGPGTSTEPSEGSAPGSPAGSPTSTEEGTSTEPSEGSAPGTSTEPSEGSAPGTSESATPESGPGSEPATSGSETPGSEPATSGSETPGSPAGSPTSTEEGTSESATPESGPGTSTEPSEGSAPGTSTEPSEGSAPGSPAGSPTSTEEGTSTEPSEGSAPGTSTEPSEGSAPGTSESATPESGPGTSTEPSEGSAPGTSESATPESGPGSEPATSGSETPGTSTEPSEGSAPGTSTEPSEGSAPGTSESATPESGPGTSESATPESGPGSPAGSPTSTEEGTSESATPESGPGSEPATSGSETPGTSESATPESGPGTSTEPSEGSAPGTSTEPSEGSAPGTSTEPSEGSAPGTSTEPSEGSAPGTSTEPSEGSAPGTSTEPSEGSAPGSPAGSPTSTEEGTSTEPSEGSAPGTSESATPESGPGSEPATSGSETPGTSESATPESGPGSEPATSGSETPGTSESATPESGPGTSTEPSEGSAPGTSESATPESGPGSPAGSPTSTEEGSPAGSPTSTEEGSPAGSPTSTEEGTSESATPESGPGTSTEPSEGSAPGMRPSGRKSSKMQAFRIWDVNQKTFYLRNNQLVAGYLQGPNVNLEEKIDVVPIEPHALFLGIHGGKMCLSCVKSGDETRLQLEAVNITDLSENRKQDKRFAFIRSDSGPTTSFESAACPGWFLCTAMEADQPVSLTNMPDEGVMVTKFYFQEDE

SEQ ID NO: 1576 - protein, 940 aa, Artificial Sequence
  Description of Artificial Sequence: Synthetic polypeptide
MDSDETGFEHSGLWVSVLAGLLLGACQAHPIPDSSPLLQFGGQVRQRYLYTDDAQQTEAHLEIREDGTVGGAADQSPESLLQLKALKPGVIQILGVKTSRFLCQRPDGALYGSLHFDPEACSFRELLLEDGYNVYQSEAHGLPLHLPGNKSPHRDPAPRGPARFLPLPGLPPALPEPPGILAPQPPDVGSSDPLSMVGPSQGRSPSYASGGSPAGSPTSTEEGTSESATPESGPGTSTEPSEGSAPGSPAGSPTSTEEGTSTEPSEGSAPGTSTEPSEGSAPGTSESATPESGPGSEPATSGSETPGSEPATSGSETPGSPAGSPTSTEEGTSESATPESGPGTSTEPSEGSAPGTSTEPSEGSAPGSPAGSPTSTEEGTSTEPSEGSAPGTSTEPSEGSAPGTSESATPESGPGTSTEPSEGSAPGTSESATPESGPGSEPATSGSETPGTSTEPSEGSAPGTSTEPSEGSAPGTSESATPESGPGTSESATPESGPGSPAGSPTSTEEGTSESATPESGPGSEPATSGSETPGTSESATPESGPGTSTEPSEGSAPGTSTEPSEGSAPGTSTEPSEGSAPGTSTEPSEGSAPGTSTEPSEGSAPGTSTEPSEGSAPGSPAGSPTSTEEGTSTEPSEGSAPGTSESATPESGPGSEPATSGSETPGTSESATPESGPGSEPATSGSETPGTSESATPESGPGTSTEPSEGSAPGTSESATPESGPGSPAGSPTSTEEGSPAGSPTSTEEGSPAGSPTSTEEGTSESATPESGPGTSTEPSEGSAPGMRPSGRKSSKMQAFRIWDVNQKTFYLRNNQLVAGYLQGPNVNLEEKIDVVPIEPHALFLGIHGGKMCLSCVKSGDETRLQLEAVNITDLSENRKQDKRFAFIRSDSGPTTSFESAACPGWFLCTAMEADQPVSLTNMPDEGVMVTKFYFQEDE

SEQ ID NO: 1577 - protein, 765 aa, Artificial Sequence
  Description of Artificial Sequence: Synthetic polypeptide
QLGPQGPPHLVADPSKKQGPWLEEEEEAYGWMDFGGSPAGSPTSTEEGTSESATPESGPGTSTEPSEGSAPGSPAGSPTSTEEGTSTEPSEGSAPGTSTEPSEGSAPGTSESATPESGPGSEPATSGSETPGSEPATSGSETPGSPAGSPTSTEEGTSESATPESGPGTSTEPSEGSAPGTSTEPSEGSAPGSPAGSPTSTEEGTSTEPSEGSAPGTSTEPSEGSAPGTSESATPESGPGTSTEPSEGSAPGTSESATPESGPGSEPATSGSETPGTSTEPSEGSAPGTSTEPSEGSAPGTSESATPESGPGTSESATPESGPGSPAGSPTSTEEGTSESATPESGPGSEPATSGSETPGTSESATPESGPGTSTEPSEGSAPGTSTEPSEGSAPGTSTEPSEGSAPGTSTEPSEGSAPGTSTEPSEGSAPGTSTEPSEGSAPGSPAGSPTSTEEGTSTEPSEGSAPGTSESATPESGPGSEPATSGSETPGTSESATPESGPGSEPATSGSETPGTSESATPESGPGTSTEPSEGSAPGTSESATPESGPGSPAGSPTSTEEGSPAGSPTSTEEGSPAGSPTSTEEGTSESATPESGPGTSTEPSEGSAPGMRPSGRKSSKMQAFRIWDVNQKTFYLRNNQLVAGYLQGPNVNLEEKIDVVPIEPHALFLGIHGGKMCLSCVKSGDETRLQLEAVNITDLSENRKQDKRFAFIRSDSGPTTSFESAACPGWFLCTAMEADQPVSLTNMPDEGVMVTKFYFQEDE

SEQ ID NO: 1578 - protein, 753 aa, Artificial Sequence
  Description of Artificial Sequence: Synthetic polypeptide
DPSKKQGPWLEEEEEAYGWMDFGGSPAGSPTSTEEGTSESATPESGPGTSTEPSEGSAPGSPAGSPTSTEEGTSTEPSEGSAPGTSTEPSEGSAPGTSESATPESGPGSEPATSGSETPGSEPATSGSETPGSPAGSPTSTEEGTSESATPESGPGTSTEPSEGSAPGTSTEPSEGSAPGSPAGSPTSTEEGTSTEPSEGSAPGTSTEPSEGSAPGTSESATPESGPGTSTEPSEGSAPGTSESATPESGPGSEPATSGSETPGTSTEPSEGSAPGTSTEPSEGSAPGTSESATPESGPGTSESATPESGPGSPAGSPTSTEEGTSESATPESGPGSEPATSGSETPGTSESATPESGPGTSTEPSEGSAPGTSTEPSEGSAPGTSTEPSEGSAPGTSTEPSEGSAPGTSTEPSEGSAPGTSTEPSEGSAPGSPAGSPTSTEEGTSTEPSEGSAPGTSESATPESGPGSEPATSGSETPGTSESATPESGPGSEPATSGSETPGTSESATPESGPGTSTEPSEGSAPGTSESATPESGPGSPAGSPTSTEEGSPAGSPTSTEEGSPAGSPTSTEEGTSESATPESGPGTSTEPSEGSAPGMRPSGRKSSKMQAFRIWDVNQKTFYLRNNQLVAGYLQGPNVNLEEKIDVVPIEPHALFLGIHGGKMCLSCVKSGDETRLQLEAVNITDLSENRKQDKRFAFIRSDSGPTTSFESAACPGWFLCTAMEADQPVSLTNMPDEGVMVTKFYFQEDE

SEQ ID NO: 1579 - protein, 773 aa, Artificial Sequence
  Description of Artificial Sequence: Synthetic polypeptide
YAEGTFISDYSIAMDKIHQQDFVNWLLAQKGKKNDWKHNITQGGSPAGSPTSTEEGTSESATPESGPGTSTEPSEGSAPGSPAGSPTSTEEGTSTEPSEGSAPGTSTEPSEGSAPGTSESATPESGPGSEPATSGSETPGSEPATSGSETPGSPAGSPTSTEEGTSESATPESGPGTSTEPSEGSAPGTSTEPSEGSAPGSPAGSPTSTEEGTSTEPSEGSAPGTSTEPSEGSAPGTSESATPESGPGTSTEPSEGSAPGTSESATPESGPGSEPATSGSETPGTSTEPSEGSAPGTSTEPSEGSAPGTSESATPESGPGTSESATPESGPGSPAGSPTSTEEGTSESATPESGPGSEPATSGSETPGTSESATPESGPGTSTEPSEGSAPGTSTEPSEGSAPGTSTEPSEGSAPGTSTEPSEGSAPGTSTEPSEGSAPGTSTEPSEGSAPGSPAGSPTSTEEGTSTEPSEGSAPGTSESATPESGPGSEPATSGSETPGTSESATPESGPGSEPATSGSETPGTSESATPESGPGTSTEPSEGSAPGTSESATPESGPGSPAGSPTSTEEGSPAGSPTSTEEGSPAGSPTSTEEGTSESATPESGPGTSTEPSEGSAPGMRPSGRKSSKMQAFRIWDVNQKTFYLRNNQLVAGYLQGPNVNLEEKIDVVPIEPHALFLGIHGGKMCLSCVKSGDETRLQLEAVNITDLSENRKQDKRFAFIRSDSGPTTSFESAACPGWFLCTAMEADQPVSLTNMPDEGVMVTKFYFQEDE

SEQ ID NO: 1580 - protein, 760 aa, Artificial Sequence
  Description of Artificial Sequence: Synthetic polypeptide
HSQGTFTSDYSKYLDSRRAQDFVQWLMNTGGSPAGSPTSTEEGTSESATPESGPGTSTEPSEGSAPGSPAGSPTSTEEGTSTEPSEGSAPGTSTEPSEGSAPGTSESATPESGPGSEPATSGSETPGSEPATSGSETPGSPAGSPTSTEEGTSESATPESGPGTSTEPSEGSAPGTSTEPSEGSAPGSPAGSPTSTEEGTSTEPSEGSAPGTSTEPSEGSAPGTSESATPESGPGTSTEPSEGSAPGTSESATPESGPGSEPATSGSETPGTSTEPSEGSAPGTSTEPSEGSAPGTSESATPESGPGTSESATPESGPGSPAGSPTSTEEGTSESATPESGPGSEPATSGSETPGTSESATPESGPGTSTEPSEGSAPGTSTEPSEGSAPGTSTEPSEGSAPGTSTEPSEGSAPGTSTEPSEGSAPGTSTEPSEGSAPGSPAGSPTSTEEGTSTEPSEGSAPGTSESATPESGPGSEPATSGSETPGTSESATPESGPGSEPATSGSETPGTSESATPESGPGTSTEPSEGSAPGTSESATPESGPGSPAGSPTSTEEGSPAGSPTSTEEGSPAGSPTSTEEGTSESATPESGPGTSTEPSEGSAPGMRPSGRKSSKMQAFRIWDVNQKTFYLRNNQLVAGYLQGPNVNLEEKIDVVPIEPHALFLGIHGGKMCLSCVKSGDETRLQLEAVNITDLSENRKQDKRFAFIRSDSGPTTSFESAACPGWFLCTAMEADQPVSLTNMPDEGVMVTKFYFQEDE

SEQ ID NO: 1581 - protein, 768 aa, Artificial Sequence
  Description of Artificial Sequence: Synthetic polypeptide
HDEFERHAEGTFTSDVSSTLEGQAALEFIAWLVKGRGGGSPAGSPTSTEEGTSESATPESGPGTSTEPSEGSAPGSPAGSPTSTEEGTSTEPSEGSAPGTSTEPSEGSAPGTSESATPESGPGSEPATSGSETPGSEPATSGSETPGSPAGSPTSTEEGTSESATPESGPGTSTEPSEGSAPGTSTEPSEGSAPGSPAGSPTSTEEGTSTEPSEGSAPGTSTEPSEGSAPGTSESATPESGPGTSTEPSEGSAPGTSESATPESGPGSEPATSGSETPGTSTEPSEGSAPGTSTEPSEGSAPGTSESATPESGPGTSESATPESGPGSPAGSPTSTEEGTSESATPESGPGSEPATSGSETPGTSESATPESGPGTSTEPSEGSAPGTSTEPSEGSAPGTSTEPSEGSAPGTSTEPSEGSAPGTSTEPSEGSAPGTSTEPSEGSAPGSPAGSPTSTEEGTSTEPSEGSAPGTSESATPESGPGSEPATSGSETPGTSESATPESGPGSEPATSGSETPGTSESATPESGPGTSTEPSEGSAPGTSESATPESGPGSPAGSPTSTEEGSPAGSPTSTEEGSPAGSPTSTEEGTSESATPESGPGTSTEPSEGSAPGMRPSGRKSSKMQAFRIWDVNQKTFYLRNNQLVAGYLQGPNVNLEEKIDVVPIEPHALFLGIHGGKMCLSCVKSGDETRLQLEAVNITDLSENRKQDKRFAFIRSDSGPTTSFESAACPGWFLCTAMEADQPVSLTNMPDEGVMVTKFYFQEDE

SEQ ID NO: 1582 - protein, 761 aa, Artificial Sequence
  Description of Artificial Sequence: Synthetic polypeptide
HAEGTFTSDVSSYLEGQAALEFIAWLVKGRGGSPAGSPTSTEEGTSESATPESGPGTSTEPSEGSAPGSPAGSPTSTEEGTSTEPSEGSAPGTSTEPSEGSAPGTSESATPESGPGSEPATSGSETPGSEPATSGSETPGSPAGSPTSTEEGTSESATPESGPGTSTEPSEGSAPGTSTEPSEGSAPGSPAGSPTSTEEGTSTEPSEGSAPGTSTEPSEGSAPGTSESATPESGPGTSTEPSEGSAPGTSESATPESGPGSEPATSGSETPGTSTEPSEGSAPGTSTEPSEGSAPGTSESATPESGPGTSESATPESGPGSPAGSPTSTEEGTSESATPESGPGSEPATSGSETPGTSESATPESGPGTSTEPSEGSAPGTSTEPSEGSAPGTSTEPSEGSAPGTSTEPSEGSAPGTSTEPSEGSAPGTSTEPSEGSAPGSPAGSPTSTEEGTSTEPSEGSAPGTSESATPESGPGSEPATSGSETPGTSESATPESGPGSEPATSGSETPGTSESATPESGPGTSTEPSEGSAPGTSESATPESGPGSPAGSPTSTEEGSPAGSPTSTEEGSPAGSPTSTEEGTSESATPESGPGTSTEPSEGSAPGMRPSGRKSSKMQAFRIWDVNQKTFYLRNNQLVAGYLQGPNVNLEEKIDVVPIEPHALFLGIHGGKMCLSCVKSGDETRLQLEAVNITDLSENRKQDKRFAFIRSDSGPTTSFESAACPGWFLCTAMEADQPVSLTNMPDEGVMVTKFYFQEDE

SEQ ID NO: 1583 - protein, 764 aa, Artificial Sequence
  Description of Artificial Sequence: Synthetic polypeptide
HADGSFSDEMNTILDNLAARDFINWLIETKITDGGSPAGSPTSTEEGTSESATPESGPGTSTEPSEGSAPGSPAGSPTSTEEGTSTEPSEGSAPGTSTEPSEGSAPGTSESATPESGPGSEPATSGSETPGSEPATSGSETPGSPAGSPTSTEEGTSESATPESGPGTSTEPSEGSAPGTSTEPSEGSAPGSPAGSPTSTEEGTSTEPSEGSAPGTSTEPSEGSAPGTSESATPESGPGTSTEPSEGSAPGTSESATPESGPGSEPATSGSETPGTSTEPSEGSAPGTSTEPSEGSAPGTSESATPESGPGTSESATPESGPGSPAGSPTSTEEGTSESATPESGPGSEPATSGSETPGTSESATPESGPGTSTEPSEGSAPGTSTEPSEGSAPGTSTEPSEGSAPGTSTEPSEGSAPGTSTEPSEGSAPGTSTEPSEGSAPGSPAGSPTSTEEGTSTEPSEGSAPGTSESATPESGPGSEPATSGSETPGTSESATPESGPGSEPATSGSETPGTSESATPESGPGTSTEPSEGSAPGTSESATPESGPGSPAGSPTSTEEGSPAGSPTSTEEGSPAGSPTSTEEGTSESATPESGPGTSTEPSEGSAPGMRPSGRKSSKMQAFRIWDVNQKTFYLRNNQLVAGYLQGPNVNLEEKIDVVPIEPHALFLGIHGGKMCLSCVKSGDETRLQLEAVNITDLSENRKQDKRFAFIRSDSGPTTSFESAACPGWFLCTAMEADQPVSLTNMPDEGVMVTKFYFQEDE

SEQ ID NO: 1584 - protein, 801 aa, Artificial Sequence
  Description of Artificial Sequence: Synthetic polypeptide
GPETLCGAELVDALQFVCGDRGFYFNKPTGYGSSSRRAPQTGIVDECCFRSCDLRRLEMYCAPLKPAKSAGGSPAGSPTSTEEGTSESATPESGPGTSTEPSEGSAPGSPAGSPTSTEEGTSTEPSEGSAPGTSTEPSEGSAPGTSESATPESGPGSEPATSGSETPGSEPATSGSETPGSPAGSPTSTEEGTSESATPESGPGTSTEPSEGSAPGTSTEPSEGSAPGSPAGSPTSTEEGTSTEPSEGSAPGTSTEPSEGSAPGTSESATPESGPGTSTEPSEGSAPGTSESATPESGPGSEPATSGSETPGTSTEPSEGSAPGTSTEPSEGSAPGTSESATPESGPGTSESATPESGPGSPAGSPTSTEEGTSESATPESGPGSEPATSGSETPGTSESATPESGPGTSTEPSEGSAPGTSTEPSEGSAPGTSTEPSEGSAPGTSTEPSEGSAPGTSTEPSEGSAPGTSTEPSEGSAPGSPAGSPTSTEEGTSTEPSEGSAPGTSESATPESGPGSEPATSGSETPGTSESATPESGPGSEPATSGSETPGTSESATPESGPGTSTEPSEGSAPGTSESATPESGPGSPAGSPTSTEEGSPAGSPTSTEEGSPAGSPTSTEEGTSESATPESGPGTSTEPSEGSAPGMRPSGRKSSKMQAFRIWDVNQKTFYLRNNQLVAGYLQGPNVNLEEKIDVVPIEPHALFLGIHGGKMCLSCVKSGDETRLQLEAVNITDLSENRKQDKRFAFIRSDSGPTTSFESAACPGWFLCTAMEADQPVSLTNMPDEGVMVTKFYFQEDE

SEQ ID NO: 1585 - protein, 798 aa, Artificial Sequence
  Description of Artificial Sequence: Synthetic polypeptide
AYRPSETLCGGELVDTLQFVCGDRGFYFSRPASRVSRRSRGIVEECCFRSCDLALLETYCATPAKSEGGSPAGSPTSTEEGTSESATPESGPGTSTEPSEGSAPGSPAGSPTSTEEGTSTEPSEGSAPGTSTEPSEGSAPGTSESATPESGPGSEPATSGSETPGSEPATSGSETPGSPAGSPTSTEEGTSESATPESGPGTSTEPSEGSAPGTSTEPSEGSAPGSPAGSPTSTEEGTSTEPSEGSAPGTSTEPSEGSAPGTSESATPESGPGTSTEPSEGSAPGTSESATPESGPGSEPATSGSETPGTSTEPSEGSAPGTSTEPSEGSAPGTSESATPESGPGTSESATPESGPGSPAGSPTSTEEGTSESATPESGPGSEPATSGSETPGTSESATPESGPGTSTEPSEGSAPGTSTEPSEGSAPGTSTEPSEGSAPGTSTEPSEGSAPGTSTEPSEGSAPGTSTEPSEGSAPGSPAGSPTSTEEGTSTEPSEGSAPGTSESATPESGPGSEPATSGSETPGTSESATPESGPGSEPATSGSETPGTSESATPESGPGTSTEPSEGSAPGTSESATPESGPGSPAGSPTSTEEGSPAGSPTSTEEGSPAGSPTSTEEGTSESATPESGPGTSTEPSEGSAPGMRPSGRKSSKMQAFRIWDVNQKTFYLRNNQLVAGYLQGPNVNLEEKIDVVPIEPHALFLGIHGGKMCLSCVKSGDETRLQLEAVNITDLSENRKQDKRFAFIRSDSGPTTSFESAACPGWFLCTAMEADQPVSLTNMPDEGVMVTKFYFQEDE

SEQ ID NO: 1586 - protein, 880 aa, Artificial Sequence
  Description of Artificial Sequence: Synthetic polypeptide
EESQKKLPSSRITCPQGSVAYGSYCYSLILIPQTWSNAELSCQMHFSGHLAFLLSTGEITFVSSLVKNSLTAYQYIWIGLHDPSHGTLPNGSGWKWSSSNVLTFYNWERNPSIAADRGYCAVLSQKSGFQKWRDFNCENELPYICKFKVGGSPAGSPTSTEEGTSESATPESGPGTSTEPSEGSAPGSPAGSPTSTEEGTSTEPSEGSAPGTSTEPSEGSAPGTSESATPESGPGSEPATSGSETPGSEPATSGSETPGSPAGSPTSTEEGTSESATPESGPGTSTEPSEGSAPGTSTEPSEGSAPGSPAGSPTSTEEGTSTEPSEGSAPGTSTEPSEGSAPGTSESATPESGPGTSTEPSEGSAPGTSESATPESGPGSEPATSGSETPGTSTEPSEGSAPGTSTEPSEGSAPGTSESATPESGPGTSESATPESGPGSPAGSPTSTEEGTSESATPESGPGSEPATSGSETPGTSESATPESGPGTSTEPSEGSAPGTSTEPSEGSAPGTSTEPSEGSAPGTSTEPSEGSAPGTSTEPSEGSAPGTSTEPSEGSAPGSPAGSPTSTEEGTSTEPSEGSAPGTSESATPESGPGSEPATSGSETPGTSESATPESGPGSEPATSGSETPGTSESATPESGPGTSTEPSEGSAPGTSESATPESGPGSPAGSPTSTEEGSPAGSPTSTEEGSPAGSPTSTEEGTSESATPESGPGTSTEPSEGSAPGMRPSGRKSSKMQAFRIWDVNQKTFYLRNNQLVAGYLQGPNVNLEEKIDVVPIEPHALFLGIHGGKMCLSCVKSGDETRLQLEAVNITDLSENRKQDKRFAFIRSDSGPTTSFESAACPGWFLCTAMEADQPVSLTNMPDEGVMVTKFYFQEDE

SEQ ID NO: 1587 - protein, 778 aa, Artificial Sequence
  Description of Artificial Sequence: Synthetic polypeptide
TQAQLLRVGCVLGTCQVQNLSHRLWQLMGPAGRQDSAPVDPSSPHSYGGSPAGSPTSTEEGTSESATPESGPGTSTEPSEGSAPGSPAGSPTSTEEGTSTEPSEGSAPGTSTEPSEGSAPGTSESATPESGPGSEPATSGSETPGSEPATSGSETPGSPAGSPTSTEEGTSESATPESGPGTSTEPSEGSAPGTSTEPSEGSAPGSPAGSPTSTEEGTSTEPSEGSAPGTSTEPSEGSAPGTSESATPESGPGTSTEPSEGSAPGTSESATPESGPGSEPATSGSETPGTSTEPSEGSAPGTSTEPSEGSAPGTSESATPESGPGTSESATPESGPGSPAGSPTSTEEGTSESATPESGPGSEPATSGSETPGTSESATPESGPGTSTEPSEGSAPGTSTEPSEGSAPGTSTEPSEGSAPGTSTEPSEGSAPGTSTEPSEGSAPGTSTEPSEGSAPGSPAGSPTSTEEGTSTEPSEGSAPGTSESATPESGPGSEPATSGSETPGTSESATPESGPGSEPATSGSETPGTSESATPESGPGTSTEPSEGSAPGTSESATPESGPGSPAGSPTSTEEGSPAGSPTSTEEGSPAGSPTSTEEGTSESATPESGPGTSTEPSEGSAPGMRPSGRKSSKMQAFRIWDVNQKTFYLRNNQLVAGYLQGPNVNLEEKIDVVPIEPHALFLGIHGGKMCLSCVKSGDETRLQLEAVNITDLSENRKQDKRFAFIRSDSGPTTSFESAACPGWFLCTAMEADQPVSLTNMPDEGVMVTKFYFQEDE

SEQ ID NO: 1588 - protein, 877 aa, Artificial Sequence
  Description of Artificial Sequence: Synthetic polypeptide
VPIQKVQDDTKTLIKTIVTRINDISHTQSVSSKQKVTGLDFIPGLHPILTLSKMDQTLAVYQQILTSMPSRNVIQISNDLENLRDLLHVLAFSKSCHLPWASGLETLDSLGGVLEASGYSTEVVALSRLQGSLQDMLWQLDLSPGCGGSPAGSPTSTEEGTSESATPESGPGTSTEPSEGSAPGSPAGSPTSTEEGTSTEPSEGSAPGTSTEPSEGSAPGTSESATPESGPGSEPATSGSETPGSEPATSGSETPGSPAGSPTSTEEGTSESATPESGPGTSTEPSEGSAPGTSTEPSEGSAPGSPAGSPTSTEEGTSTEPSEGSAPGTSTEPSEGSAPGTSESATPESGPGTSTEPSEGSAPGTSESATPESGPGSEPATSGSETPGTSTEPSEGSAPGTSTEPSEGSAPGTSESATPESGPGTSESATPESGPGSPAGSPTSTEEGTSESATPESGPGSEPATSGSETPGTSESATPESGPGTSTEPSEGSAPGTSTEPSEGSAPGTSTEPSEGSAPGTSTEPSEGSAPGTSTEPSEGSAPGTSTEPSEGSAPGSPAGSPTSTEEGTSTEPSEGSAPGTSESATPESGPGSEPATSGSETPGTSESATPESGPGSEPATSGSETPGTSESATPESGPGTSTEPSEGSAPGTSESATPESGPGSPAGSPTSTEEGSPAGSPTSTEEGSPAGSPTSTEEGTSESATPESGPGTSTEPSEGSAPGMRPSGRKSSKMQAFRIWDVNQKTFYLRNNQLVAGYLQGPNVNLEEKIDVVPIEPHALFLGIHGGKMCLSCVKSGDETRLQLEAVNITDLSENRKQDKRFAFIRSDSGPTTSFESAACPGWFLCTAMEADQPVSLTNMPDEGVMVTKFYFQEDE

SEQ ID NO: 1589 - protein, 756 aa, Artificial Sequence
  Description of Artificial Sequence: Synthetic polypeptide
FRVDEEFQSPFASQSRGYFLFRPRNGGSPAGSPTSTEEGTSESATPESGPGTSTEPSEGSAPGSPAGSPTSTEEGTSTEPSEGSAPGTSTEPSEGSAPGTSESATPESGPGSEPATSGSETPGSEPATSGSETPGSPAGSPTSTEEGTSESATPESGPGTSTEPSEGSAPGTSTEPSEGSAPGSPAGSPTSTEEGTSTEPSEGSAPGTSTEPSEGSAPGTSESATPESGPGTSTEPSEGSAPGTSESATPESGPGSEPATSGSETPGTSTEPSEGSAPGTSTEPSEGSAPGTSESATPESGPGTSESATPESGPGSPAGSPTSTEEGTSESATPESGPGSEPATSGSETPGTSESATPESGPGTSTEPSEGSAPGTSTEPSEGSAPGTSTEPSEGSAPGTSTEPSEGSAPGTSTEPSEGSAPGTSTEPSEGSAPGSPAGSPTSTEEGTSTEPSEGSAPGTSESATPESGPGSEPATSGSETPGTSESATPESGPGSEPATSGSETPGTSESATPESGPGTSTEPSEGSAPGTSESATPESGPGSPAGSPTSTEEGSPAGSPTSTEEGSPAGSPTSTEEGTSESATPESGPGTSTEPSEGSAPGMRPSGRKSSKMQAFRIWDVNQKTFYLRNNQLVAGYLQGPNVNLEEKIDVVPIEPHALFLGIHGGKMCLSCVKSGDETRLQLEAVNITDLSENRKQDKRFAFIRSDSGPTTSFESAACPGWFLCTAMEADQPVSLTNMPDEGVMVTKFYFQEDE

SEQ ID NO: 1590 - protein, 768 aa, Artificial Sequence
  Description of Artificial Sequence: Synthetic polypeptide
HSQGTFTSDYSKYLDSRRAQDFVQWLMNTKRNRNNIAGGSPAGSPTSTEEGTSESATPESGPGTSTEPSEGSAPGSPAGSPTSTEEGTSTEPSEGSAPGTSTEPSEGSAPGTSESATPESGPGSEPATSGSETPGSEPATSGSETPGSPAGSPTSTEEGTSESATPESGPGTSTEPSEGSAPGTSTEPSEGSAPGSPAGSPTSTEEGTSTEPSEGSAPGTSTEPSEGSAPGTSESATPESGPGTSTEPSEGSAPGTSESATPESGPGSEPATSGSETPGTSTEPSEGSAPGTSTEPSEGSAPGTSESATPESGPGTSESATPESGPGSPAGSPTSTEEGTSESATPESGPGSEPATSGSETPGTSESATPESGPGTSTEPSEGSAPGTSTEPSEGSAPGTSTEPSEGSAPGTSTEPSEGSAPGTSTEPSEGSAPGTSTEPSEGSAPGSPAGSPTSTEEGTSTEPSEGSAPGTSESATPESGPGSEPATSGSETPGTSESATPESGPGSEPATSGSETPGTSESATPESGPGTSTEPSEGSAPGTSESATPESGPGSPAGSPTSTEEGSPAGSPTSTEEGSPAGSPTSTEEGTSESATPESGPGTSTEPSEGSAPGMRPSGRKSSKMQAFRIWDVNQKTFYLRNNQLVAGYLQGPNVNLEEKIDVVPIEPHALFLGIHGGKMCLSCVKSGDETRLQLEAVNITDLSENRKQDKRFAFIRSDSGPTTSFESAACPGWFLCTAMEADQPVSLTNMPDEGVMVTKFYFQEDE

SEQ ID NO: 1591 - protein, 768 aa, Artificial Sequence
  Description of Artificial Sequence: Synthetic polypeptide
KCNTATCATNRLANFLVHSSNNFGPILPPTNVGSNTYGGSPAGSPTSTEEGTSESATPESGPGTSTEPSEGSAPGSPAGSPTSTEEGTSTEPSEGSAPGTSTEPSEGSAPGTSESATPESGPGSEPATSGSETPGSEPATSGSETPGSPAGSPTSTEEGTSESATPESGPGTSTEPSEGSAPGTSTEPSEGSAPGSPAGSPTSTEEGTSTEPSEGSAPGTSTEPSEGSAPGTSESATPESGPGTSTEPSEGSAPGTSESATPESGPGSEPATSGSETPGTSTEPSEGSAPGTSTEPSEGSAPGTSESATPESGPGTSESATPESGPGSPAGSPTSTEEGTSESATPESGPGSEPATSGSETPGTSESATPESGPGTSTEPSEGSAPGTSTEPSEGSAPGTSTEPSEGSAPGTSTEPSEGSAPGTSTEPSEGSAPGTSTEPSEGSAPGSPAGSPTSTEEGTSTEPSEGSAPGTSESATPESGPGSEPATSGSETPGTSESATPESGPGSEPATSGSETPGTSESATPESGPGTSTEPSEGSAPGTSESATPESGPGSPAGSPTSTEEGSPAGSPTSTEEGSPAGSPTSTEEGTSESATPESGPGTSTEPSEGSAPGMRPSGRKSSKMQAFRIWDVNQKTFYLRNNQLVAGYLQGPNVNLEEKIDVVPIEPHALFLGIHGGKMCLSCVKSGDETRLQLEAVNITDLSENRKQDKRFAFIRSDSGPTTSFESAACPGWFLCTAMEADQPVSLTNMPDEGVMVTKFYFQEDE

SEQ ID NO: 1592 - protein, 767 aa, Artificial Sequence
  Description of Artificial Sequence: Synthetic polypeptide
YPIKPEAPGEDASPEELNRYYASLRHYLNLVTRQRYGGSPAGSPTSTEEGTSESATPESGPGTSTEPSEGSAPGSPAGSPTSTEEGTSTEPSEGSAPGTSTEPSEGSAPGTSESATPESGPGSEPATSGSETPGSEPATSGSETPGSPAGSPTSTEEGTSESATPESGPGTSTEPSEGSAPGTSTEPSEGSAPGSPAGSPTSTEEGTSTEPSEGSAPGTSTEPSEGSAPGTSESATPESGPGTSTEPSEGSAPGTSESATPESGPGSEPATSGSETPGTSTEPSEGSAPGTSTEPSEGSAPGTSESATPESGPGTSESATPESGPGSPAGSPTSTEEGTSESATPESGPGSEPATSGSETPGTSESATPESGPGTSTEPSEGSAPGTSTEPSEGSAPGTSTEPSEGSAPGTSTEPSEGSAPGTSTEPSEGSAPGTSTEPSEGSAPGSPAGSPTSTEEGTSTEPSEGSAPGTSESATPESGPGSEPATSGSETPGTSESATPESGPGSEPATSGSETPGTSESATPESGPGTSTEPSEGSAPGTSESATPESGPGSPAGSPTSTEEGSPAGSPTSTEEGSPAGSPTSTEEGTSESATPESGPGTSTEPSEGSAPGMRPSGRKSSKMQAFRIWDVNQKTFYLRNNQLVAGYLQGPNVNLEEKIDVVPIEPHALFLGIHGGKMCLSCVKSGDETRLQLEAVNITDLSENRKQDKRFAFIRSDSGPTTSFESAACPGWFLCTAMEADQPVSLTNMPDEGVMVTKFYFQEDE

SEQ ID NO: 1593 - protein, 772 aa, Artificial Sequence
  Description of Artificial Sequence: Synthetic polypeptide
IVLSLDVPIGLLQILLEQARARAAREQATTNARILARVGHCGGSPAGSPTSTEEGTSESATPESGPGTSTEPSEGSAPGSPAGSPTSTEEGTSTEPSEGSAPGTSTEPSEGSAPGTSESATPESGPGSEPATSGSETPGSEPATSGSETPGSPAGSPTSTEEGTSESATPESGPGTSTEPSEGSAPGTSTEPSEGSAPGSPAGSPTSTEEGTSTEPSEGSAPGTSTEPSEGSAPGTSESATPESGPGTSTEPSEGSAPGTSESATPESGPGSEPATSGSETPGTSTEPSEGSAPGTSTEPSEGSAPGTSESATPESGPGTSESATPESGPGSPAGSPTSTEEGTSESATPESGPGSEPATSGSETPGTSESATPESGPGTSTEPSEGSAPGTSTEPSEGSAPGTSTEPSEGSAPGTSTEPSEGSAPGTSTEPSEGSAPGTSTEPSEGSAPGSPAGSPTSTEEGTSTEPSEGSAPGTSESATPESGPGSEPATSGSETPGTSESATPESGPGSEPATSGSETPGTSESATPESGPGTSTEPSEGSAPGTSESATPESGPGSPAGSPTSTEEGSPAGSPTSTEEGSPAGSPTSTEEGTSESATPESGPGTSTEPSEGSAPGMRPSGRKSSKMQAFRIWDVNQKTFYLRNNQLVAGYLQGPNVNLEEKIDVVPIEPHALFLGIHGGKMCLSCVKSGDETRLQLEAVNITDLSENRKQDKRFAFIRSDSGPTTSFESAACPGWFLCTAMEADQPVSLTNMPDEGVMVTKFYFQEDE

SEQ ID NO: 1594 - protein, 769 aa, Artificial Sequence
  Description of Artificial Sequence: Synthetic polypeptide
FTLSLDVPTNIMNLLFNIAKAKNLRAQAAANAHLMAQIGGSPAGSPTSTEEGTSESATPESGPGTSTEPSEGSAPGSPAGSPTSTEEGTSTEPSEGSAPGTSTEPSEGSAPGTSESATPESGPGSEPATSGSETPGSEPATSGSETPGSPAGSPTSTEEGTSESATPESGPGTSTEPSEGSAPGTSTEPSEGSAPGSPAGSPTSTEEGTSTEPSEGSAPGTSTEPSEGSAPGTSESATPESGPGTSTEPSEGSAPGTSESATPESGPGSEPATSGSETPGTSTEPSEGSAPGTSTEPSEGSAPGTSESATPESGPGTSESATPESGPGSPAGSPTSTEEGTSESATPESGPGSEPATSGSETPGTSESATPESGPGTSTEPSEGSAPGTSTEPSEGSAPGTSTEPSEGSAPGTSTEPSEGSAPGTSTEPSEGSAPGTSTEPSEGSAPGSPAGSPTSTEEGTSTEPSEGSAPGTSESATPESGPGSEPATSGSETPGTSESATPESGPGSEPATSGSETPGTSESATPESGPGTSTEPSEGSAPGTSESATPESGPGSPAGSPTSTEEGSPAGSPTSTEEGSPAGSPTSTEEGTSESATPESGPGTSTEPSEGSAPGMRPSGRKSSKMQAFRIWDVNQKTFYLRNNQLVAGYLQGPNVNLEEKIDVVPIEPHALFLGIHGGKMCLSCVKSGDETRLQLEAVNITDLSENRKQDKRFAFIRSDSGPTTSFESAACPGWFLCTAMEADQPVSLTNMPDEGVMVTKFYFQEDE

SEQ ID NO: 1595 - protein, 646 aa, Artificial Sequence
  Description of Artificial Sequence: Synthetic polypeptide
CGNLSTCMLGTYTQDFNKFHTFPQTAIGVGAPGGSPAGSPTSTEEGTSESATPESGPGTSTEPSEGSAPGSPAGSPTSTEEGTSTEPSEGSAPGTSTEPSEGSAPGTSESATPESGPGSEPATSGSETPGSEPATSGSETPGSPAGSPTSTEEGTSESATPESGPGTSTEPSEGSAPGTSTEPSEGSAPGSPAGSPTSTEEGTSTEPSEGSAPGTSTEPSEGSAPGTSESATPESGPGTSTEPSEGSAPGTSESATPESGPGSEPATSGSETPGTSTEPSEGSAPGTSTEPSEGSAPGTSESATPESGPGTSESATPESGPGSPAGSPTSTEEGTSESATPESGPGSEPATSGSETPGTSESATPESGPGTSTEPSEGSAPGTSTEPSEGSAPGTSTEPSEGSAPGTSTEPSEGSAPGTSTEPSEGSAPGTSTEPSEGSAPGSPAGSPTSTEEGTSTEPSEGSAPGTSESATPESGPGSEPATSGSETPGTSESATPESGPGSEPATSGSETPGTSESATPESGPGTSTEPSEGSAPGTSESATPESGPGSPAGSPTSTEEGSPAGSPTSTEEGSPAGSPTSTEEGTSESATPESGPGTSTEPSEGSAPGACDTATCVTHRLAGLLSRSGGVVKNMVPTNVGSKAF

SEQ ID NO: 1596 - protein, 643 aa, Artificial Sequence
  Description of Artificial Sequence: Synthetic polypeptide
CGNLSTCMLGTYTQDFNKFHTFPQTAIGVGAPGGSPAGSPTSTEEGTSESATPESGPGTSTEPSEGSAPGSPAGSPTSTEEGTSTEPSEGSAPGTSTEPSEGSAPGTSESATPESGPGSEPATSGSETPGSEPATSGSETPGSPAGSPTSTEEGTSESATPESGPGTSTEPSEGSAPGTSTEPSEGSAPGSPAGSPTSTEEGTSTEPSEGSAPGTSTEPSEGSAPGTSESATPESGPGTSTEPSEGSAPGTSESATPESGPGSEPATSGSETPGTSTEPSEGSAPGTSTEPSEGSAPGTSESATPESGPGTSESATPESGPGSPAGSPTSTEEGTSESATPESGPGSEPATSGSETPGTSESATPESGPGTSTEPSEGSAPGTSTEPSEGSAPGTSTEPSEGSAPGTSTEPSEGSAPGTSTEPSEGSAPGTSTEPSEGSAPGSPAGSPTSTEEGTSTEPSEGSAPGTSESATPESGPGSEPATSGSETPGTSESATPESGPGSEPATSGSETPGTSESATPESGPGTSTEPSEGSAPGTSESATPESGPGSPAGSPTSTEEGSPAGSPTSTEEGSPAGSPTSTEEGTSESATPESGPGTSTEPSEGSAPGKAPSGRMSIVKNLQNLDPSHRISDRDYMGWMDF

SEQ ID NO: 1597 - protein, 618 aa, Artificial Sequence
  Description of Artificial Sequence: Synthetic polypeptide
CGNLSTCMLGTYTQDFNKFHTFPQTAIGVGAPGGSPAGSPTSTEEGTSESATPESGPGTSTEPSEGSAPGSPAGSPTSTEEGTSTEPSEGSAPGTSTEPSEGSAPGTSESATPESGPGSEPATSGSETPGSEPATSGSETPGSPAGSPTSTEEGTSESATPESGPGTSTEPSEGSAPGTSTEPSEGSAPGSPAGSPTSTEEGTSTEPSEGSAPGTSTEPSEGSAPGTSESATPESGPGTSTEPSEGSAPGTSESATPESGPGSEPATSGSETPGTSTEPSEGSAPGTSTEPSEGSAPGTSESATPESGPGTSESATPESGPGSPAGSPTSTEEGTSESATPESGPGSEPATSGSETPGTSESATPESGPGTSTEPSEGSAPGTSTEPSEGSAPGTSTEPSEGSAPGTSTEPSEGSAPGTSTEPSEGSAPGTSTEPSEGSAPGSPAGSPTSTEEGTSTEPSEGSAPGTSESATPESGPGSEPATSGSETPGTSESATPESGPGSEPATSGSETPGTSESATPESGPGTSTEPSEGSAPGTSESATPESGPGSPAGSPTSTEEGSPAGSPTSTEEGSPAGSPTSTEEGTSESATPESGPGTSTEPSEGSAPGDYMGWMDF

SEQ ID NO: 1598 - protein, 649 aa, Artificial Sequence
  Description of Artificial Sequence: Synthetic polypeptide
CGNLSTCMLGTYTQDFNKFHTFPQTAIGVGAPGGSPAGSPTSTEEGTSESATPESGPGTSTEPSEGSAPGSPAGSPTSTEEGTSTEPSEGSAPGTSTEPSEGSAPGTSESATPESGPGSEPATSGSETPGSEPATSGSETPGSPAGSPTSTEEGTSESATPESGPGTSTEPSEGSAPGTSTEPSEGSAPGSPAGSPTSTEEGTSTEPSEGSAPGTSTEPSEGSAPGTSESATPESGPGTSTEPSEGSAPGTSESATPESGPGSEPATSGSETPGTSTEPSEGSAPGTSTEPSEGSAPGTSESATPESGPGTSESATPESGPGSPAGSPTSTEEGTSESATPESGPGSEPATSGSETPGTSESATPESGPGTSTEPSEGSAPGTSTEPSEGSAPGTSTEPSEGSAPGTSTEPSEGSAPGTSTEPSEGSAPGTSTEPSEGSAPGSPAGSPTSTEEGTSTEPSEGSAPGTSESATPESGPGSEPATSGSETPGTSESATPESGPGSEPATSGSETPGTSESATPESGPGTSTEPSEGSAPGTSESATPESGPGSPAGSPTSTEEGSPAGSPTSTEEGSPAGSPTSTEEGTSESATPESGPGTSTEPSEGSAPGHSDGTFTSDLSKQMEEEAVRLFIEWLKNGGPSSGAPPPS

SEQ ID NO: 1599 - protein, 649 aa, Artificial Sequence
  Description of Artificial Sequence: Synthetic polypeptide
CGNLSTCMLGTYTQDFNKFHTFPQTAIGVGAPGGSPAGSPTSTEEGTSESATPESGPGTSTEPSEGSAPGSPAGSPTSTEEGTSTEPSEGSAPGTSTEPSEGSAPGTSESATPESGPGSEPATSGSETPGSEPATSGSETPGSPAGSPTSTEEGTSESATPESGPGTSTEPSEGSAPGTSTEPSEGSAPGSPAGSPTSTEEGTSTEPSEGSAPGTSTEPSEGSAPGTSESATPESGPGTSTEPSEGSAPGTSESATPESGPGSEPATSGSETPGTSTEPSEGSAPGTSTEPSEGSAPGTSESATPESGPGTSESATPESGPGSPAGSPTSTEEGTSESATPESGPGSEPATSGSETPGTSESATPESGPGTSTEPSEGSAPGTSTEPSEGSAPGTSTEPSEGSAPGTSTEPSEGSAPGTSTEPSEGSAPGTSTEPSEGSAPGSPAGSPTSTEEGTSTEPSEGSAPGTSESATPESGPGSEPATSGSETPGTSESATPESGPGSEPATSGSETPGTSESATPESGPGTSTEPSEGSAPGTSESATPESGPGSPAGSPTSTEEGSPAGSPTSTEEGSPAGSPTSTEEGTSESATPESGPGTSTEPSEGSAPGHGEGTFTSDLSKQMEEEAVRLFIEWLKNGGPSSGAPPPS

SEQ ID NO: 1600 - protein, 826 aa, Artificial Sequence
  Description of Artificial Sequence: Synthetic polypeptide
CGNLSTCMLGTYTQDFNKFHTFPQTAIGVGAPGGSPAGSPTSTEEGTSESATPESGPGTSTEPSEGSAPGSPAGSPTSTEEGTSTEPSEGSAPGTSTEPSEGSAPGTSESATPESGPGSEPATSGSETPGSEPATSGSETPGSPAGSPTSTEEGTSESATPESGPGTSTEPSEGSAPGTSTEPSEGSAPGSPAGSPTSTEEGTSTEPSEGSAPGTSTEPSEGSAPGTSESATPESGPGTSTEPSEGSAPGTSESATPESGPGSEPATSGSETPGTSTEPSEGSAPGTSTEPSEGSAPGTSESATPESGPGTSESATPESGPGSPAGSPTSTEEGTSESATPESGPGSEPATSGSETPGTSESATPESGPGTSTEPSEGSAPGTSTEPSEGSAPGTSTEPSEGSAPGTSTEPSEGSAPGTSTEPSEGSAPGTSTEPSEGSAPGSPAGSPTSTEEGTSTEPSEGSAPGTSESATPESGPGSEPATSGSETPGTSESATPESGPGSEPATSGSETPGTSESATPESGPGTSTEPSEGSAPGTSESATPESGPGSPAGSPTSTEEGSPAGSPTSTEEGSPAGSPTSTEEGTSESATPESGPGTSTEPSEGSAPGMRSGCVVVHVWILAGLWLAVAGRPLAFSDAGPHVHYGWGDPIRLRHLYTSGPHGLSSCFLRIRADGVVDCARGQSAHSLLEIKAVALRTVAIKGVHSVRYLCMGADGKMQGLLQYSEEDCAFEEEIRPDGYNVYRSEKHRLPVSLSSAKQRQLYKNRGFLPLSHFLPMLPMVPEEPEDLRGHLESDMFSSPLETDSMDPFGLVTGLEAVRSPSFEK

SEQ ID NO: 1601 - protein, 819 aa, Artificial Sequence
  Description of Artificial Sequence: Synthetic polypeptide
CGNLSTCMLGTYTQDFNKFHTFPQTAIGVGAPGGSPAGSPTSTEEGTSESATPESGPGTSTEPSEGSAPGSPAGSPTSTEEGTSTEPSEGSAPGTSTEPSEGSAPGTSESATPESGPGSEPATSGSETPGSEPATSGSETPGSPAGSPTSTEEGTSESATPESGPGTSTEPSEGSAPGTSTEPSEGSAPGSPAGSPTSTEEGTSTEPSEGSAPGTSTEPSEGSAPGTSESATPESGPGTSTEPSEGSAPGTSESATPESGPGSEPATSGSETPGTSTEPSEGSAPGTSTEPSEGSAPGTSESATPESGPGTSESATPESGPGSPAGSPTSTEEGTSESATPESGPGSEPATSGSETPGTSESATPESGPGTSTEPSEGSAPGTSTEPSEGSAPGTSTEPSEGSAPGTSTEPSEGSAPGTSTEPSEGSAPGTSTEPSEGSAPGSPAGSPTSTEEGTSTEPSEGSAPGTSESATPESGPGSEPATSGSETPGTSESATPESGPGSEPATSGSETPGTSESATPESGPGTSTEPSEGSAPGTSESATPESGPGSPAGSPTSTEEGSPAGSPTSTEEGSPAGSPTSTEEGTSESATPESGPGTSTEPSEGSAPGMDSDETGFEHSGLWVSVLAGLLLGACQAHPIPDSSPLLQFGGQVRQRYLYTDDAQQTEAHLEIREDGTVGGAADQSPESLLQLKALKPGVIQILGVKTSRFLCQRPDGALYGSLHFDPEACSFRELLLEDGYNVYQSEAHGLPLHLPGNKSPHRDPAPRGPARFLPLPGLPPALPEPPGILAPQPPDVGSSDPLSMVGPSQGRSPSYAS

SEQ ID NO: 1602 - protein, 644 aa, Artificial Sequence
  Description of Artificial Sequence: Synthetic polypeptide
CGNLSTCMLGTYTQDFNKFHTFPQTAIGVGAPGGSPAGSPTSTEEGTSESATPESGPGTSTEPSEGSAPGSPAGSPTSTEEGTSTEPSEGSAPGTSTEPSEGSAPGTSESATPESGPGSEPATSGSETPGSEPATSGSETPGSPAGSPTSTEEGTSESATPESGPGTSTEPSEGSAPGTSTEPSEGSAPGSPAGSPTSTEEGTSTEPSEGSAPGTSTEPSEGSAPGTSESATPESGPGTSTEPSEGSAPGTSESATPESGPGSEPATSGSETPGTSTEPSEGSAPGTSTEPSEGSAPGTSESATPESGPGTSESATPESGPGSPAGSPTSTEEGTSESATPESGPGSEPATSGSETPGTSESATPESGPGTSTEPSEGSAPGTSTEPSEGSAPGTSTEPSEGSAPGTSTEPSEGSAPGTSTEPSEGSAPGTSTEPSEGSAPGSPAGSPTSTEEGTSTEPSEGSAPGTSESATPESGPGSEPATSGSETPGTSESATPESGPGSEPATSGSETPGTSESATPESGPGTSTEPSEGSAPGTSESATPESGPGSPAGSPTSTEEGSPAGSPTSTEEGSPAGSPTSTEEGTSESATPESGPGTSTEPSEGSAPGQLGPQGPPHLVADPSKKQGPWLEEEEEAYGWMDF

SEQ ID NO: 1603 - protein, 632 aa, Artificial Sequence
  Description of Artificial Sequence: Synthetic polypeptide
CGNLSTCMLGTYTQDFNKFHTFPQTAIGVGAPGGSPAGSPTSTEEGTSESATPESGPGTSTEPSEGSAPGSPAGSPTSTEEGTSTEPSEGSAPGTSTEPSEGSAPGTSESATPESGPGSEPATSGSETPGSEPATSGSETPGSPAGSPTSTEEGTSESATPESGPGTSTEPSEGSAPGTSTEPSEGSAPGSPAGSPTSTEEGTSTEPSEGSAPGTSTEPSEGSAPGTSESATPESGPGTSTEPSEGSAPGTSESATPESGPGSEPATSGSETPGTSTEPSEGSAPGTSTEPSEGSAPGTSESATPESGPGTSESATPESGPGSPAGSPTSTEEGTSESATPESGPGSEPATSGSETPGTSESATPESGPGTSTEPSEGSAPGTSTEPSEGSAPGTSTEPSEGSAPGTSTEPSEGSAPGTSTEPSEGSAPGTSTEPSEGSAPGSPAGSPTSTEEGTSTEPSEGSAPGTSESATPESGPGSEPATSGSETPGTSESATPESGPGSEPATSGSETPGTSESATPESGPGTSTEPSEGSAPGTSESATPESGPGSPAGSPTSTEEGSPAGSPTSTEEGSPAGSPTSTEEGTSESATPESGPGTSTEPSEGSAPGDPSKKQGPWLEEEEEAYGWMDF

SEQ ID NO: 1604 - protein, 652 aa, Artificial Sequence
  Description of Artificial Sequence: Synthetic polypeptide
CGNLSTCMLGTYTQDFNKFHTFPQTAIGVGAPGGSPAGSPTSTEEGTSESATPESGPGTSTEPSEGSAPGSPAGSPTSTEEGTSTEPSEGSAPGTSTEPSEGSAPGTSESATPESGPGSEPATSGSETPGSEPATSGSETPGSPAGSPTSTEEGTSESATPESGPGTSTEPSEGSAPGTSTEPSEGSAPGSPAGSPTSTEEGTSTEPSEGSAPGTSTEPSEGSAPGTSESATPESGPGTSTEPSEGSAPGTSESATPESGPGSEPATSGSETPGTSTEPSEGSAPGTSTEPSEGSAPGTSESATPESGPGTSESATPESGPGSPAGSPTSTEEGTSESATPESGPGSEPATSGSETPGTSESATPESGPGTSTEPSEGSAPGTSTEPSEGSAPGTSTEPSEGSAPGTSTEPSEGSAPGTSTEPSEGSAPGTSTEPSEGSAPGSPAGSPTSTEEGTSTEPSEGSAPGTSESATPESGPGSEPATSGSETPGTSESATPESGPGSEPATSGSETPGTSESATPESGPGTSTEPSEGSAPGTSESATPESGPGSPAGSPTSTEEGSPAGSPTSTEEGSPAGSPTSTEEGTSESATPESGPGTSTEPSEGSAPGYAEGTFISDYSIAMDKIHQQDFVNWLLAQKGKKNDWKHNITQ

SEQ ID NO: 1605 - protein, 639 aa, Artificial Sequence
  Description of Artificial Sequence: Synthetic polypeptide
CGNLSTCMLGTYTQDFNKFHTFPQTAIGVGAPGGSPAGSPTSTEEGTSESATPESGPGTSTEPSEGSAPGSPAGSPTSTEEGTSTEPSEGSAPGTSTEPSEGSAPGTSESATPESGPGSEPATSGSETPGSEPATSGSETPGSPAGSPTSTEEGTSESATPESGPGTSTEPSEGSAPGTSTEPSEGSAPGSPAGSPTSTEEGTSTEPSEGSAPGTSTEPSEGSAPGTSESATPESGPGTSTEPSEGSAPGTSESATPESGPGSEPATSGSETPGTSTEPSEGSAPGTSTEPSEGSAPGTSESATPESGPGTSESATPESGPGSPAGSPTSTEEGTSESATPESGPGSEPATSGSETPGTSESATPESGPGTSTEPSEGSAPGTSTEPSEGSAPGTSTEPSEGSAPGTSTEPSEGSAPGTSTEPSEGSAPGTSTEPSEGSAPGSPAGSPTSTEEGTSTEPSEGSAPGTSESATPESGPGSEPATSGSETPGTSESATPESGPGSEPATSGSETPGTSESATPESGPGTSTEPSEGSAPGTSESATPESGPGSPAGSPTSTEEGSPAGSPTSTEEGSPAGSPTSTEEGTSESATPESGPGTSTEPSEGSAPGHSQGTFTSDYSKYLDSRRAQDFVQWLMNT

SEQ ID NO: 1606 - protein, 647 aa, Artificial Sequence
  Description of Artificial Sequence: Synthetic polypeptide
CGNLSTCMLGTYTQDFNKFHTFPQTAIGVGAPGGSPAGSPTSTEEGTSESATPESGPGTSTEPSEGSAPGSPAGSPTSTEEGTSTEPSEGSAPGTSTEPSEGSAPGTSESATPESGPGSEPATSGSETPGSEPATSGSETPGSPAGSPTSTEEGTSESATPESGPGTSTEPSEGSAPGTSTEPSEGSAPGSPAGSPTSTEEGTSTEPSEGSAPGTSTEPSEGSAPGTSESATPESGPGTSTEPSEGSAPGTSESATPESGPGSEPATSGSETPGTSTEPSEGSAPGTSTEPSEGSAPGTSESATPESGPGTSESATPESGPGSPAGSPTSTEEGTSESATPESGPGSEPATSGSETPGTSESATPESGPGTSTEPSEGSAPGTSTEPSEGSAPGTSTEPSEGSAPGTSTEPSEGSAPGTSTEPSEGSAPGTSTEPSEGSAPGSPAGSPTSTEEGTSTEPSEGSAPGTSESATPESGPGSEPATSGSETPGTSESATPESGPGSEPATSGSETPGTSESATPESGPGTSTEPSEGSAPGTSESATPESGPGSPAGSPTSTEEGSPAGSPTSTEEGSPAGSPTSTEEGTSESATPESGPGTSTEPSEGSAPGHDEFERHAEGTFTSDVSSTLEGQAALEFIAWLVKGRG

SEQ ID NO: 1607 - protein, 640 aa, Artificial Sequence
  Description of Artificial Sequence: Synthetic polypeptide
CGNLSTCMLGTYTQDFNKFHTFPQTAIGVGAPGGSPAGSPTSTEEGTSESATPESGPGTSTEPSEGSAPGSPAGSPTSTEEGTSTEPSEGSAPGTSTEPSEGSAPGTSESATPESGPGSEPATSGSETPGSEPATSGSETPGSPAGSPTSTEEGTSESATPESGPGTSTEPSEGSAPGTSTEPSEGSAPGSPAGSPTSTEEGTSTEPSEGSAPGTSTEPSEGSAPGTSESATPESGPGTSTEPSEGSAPGTSESATPESGPGSEPATSGSETPGTSTEPSEGSAPGTSTEPSEGSAPGTSESATPESGPGTSESATPESGPGSPAGSPTSTEEGTSESATPESGPGSEPATSGSETPGTSESATPESGPGTSTEPSEGSAPGTSTEPSEGSAPGTSTEPSEGSAPGTSTEPSEGSAPGTSTEPSEGSAPGTSTEPSEGSAPGSPAGSPTSTEEGTSTEPSEGSAPGTSESATPESGPGSEPATSGSETPGTSESATPESGPGSEPATSGSETPGTSESATPESGPGTSTEPSEGSAPGTSESATPESGPGSPAGSPTSTEEGSPAGSPTSTEEGSPAGSPTSTEEGTSESATPESGPGTSTEPSEGSAPGHAEGTFTSDVSSYLEGQAALEFIAWLVKGR

SEQ ID NO: 1608 - protein, 643 aa, Artificial Sequence
  Description of Artificial Sequence: Synthetic polypeptide
CGNLSTCMLGTYTQDFNKFHTFPQTAIGVGAPGGSPAGSPTSTEEGTSESATPESGPGTSTEPSEGSAPGSPAGSPTSTEEGTSTEPSEGSAPGTSTEPSEGSAPGTSESATPESGPGSEPATSGSETPGSEPATSGSETPGSPAGSPTSTEEGTSESATPESGPGTSTEPSEGSAPGTSTEPSEGSAPGSPAGSPTSTEEGTSTEPSEGSAPGTSTEPSEGSAPGTSESATPESGPGTSTEPSEGSAPGTSESATPESGPGSEPATSGSETPGTSTEPSEGSAPGTSTEPSEGSAPGTSESATPESGPGTSESATPESGPGSPAGSPTSTEEGTSESATPESGPGSEPATSGSETPGTSESATPESGPGTSTEPSEGSAPGTSTEPSEGSAPGTSTEPSEGSAPGTSTEPSEGSAPGTSTEPSEGSAPGTSTEPSEGSAPGSPAGSPTSTEEGTSTEPSEGSAPGTSESATPESGPGSEPATSGSETPGTSESATPESGPGSEPATSGSETPGTSESATPESGPGTSTEPSEGSAPGTSESATPESGPGSPAGSPTSTEEGSPAGSPTSTEEGSPAGSPTSTEEGTSESATPESGPGTSTEPSEGSAPGHADGSFSDEMNTILDNLAARDFINWLIETKITD

SEQ ID NO: 1609 - protein, 680 aa, Artificial Sequence
  Description of Artificial Sequence: Synthetic polypeptide
CGNLSTCMLGTYTQDFNKFHTFPQTAIGVGAPGGSPAGSPTSTEEGTSESATPESGPGTSTEPSEGSAPGSPAGSPTSTEEGTSTEPSEGSAPGTSTEPSEGSAPGTSESATPESGPGSEPATSGSETPGSEPATSGSETPGSPAGSPTSTEEGTSESATPESGPGTSTEPSEGSAPGTSTEPSEGSAPGSPAGSPTSTEEGTSTEPSEGSAPGTSTEPSEGSAPGTSESATPESGPGTSTEPSEGSAPGTSESATPESGPGSEPATSGSETPGTSTEPSEGSAPGTSTEPSEGSAPGTSESATPESGPGTSESATPESGPGSPAGSPTSTEEGTSESATPESGPGSEPATSGSETPGTSESATPESGPGTSTEPSEGSAPGTSTEPSEGSAPGTSTEPSEGSAPGTSTEPSEGSAPGTSTEPSEGSAPGTSTEPSEGSAPGSPAGSPTSTEEGTSTEPSEGSAPGTSESATPESGPGSEPATSGSETPGTSESATPESGPGSEPATSGSETPGTSESATPESGPGTSTEPSEGSAPGTSESATPESGPGSPAGSPTSTEEGSPAGSPTSTEEGSPAGSPTSTEEGTSESATPESGPGTSTEPSEGSAPGGPETLCGAELVDALQFVCGDRGFYFNKPTGYGSSSRRAPQTGIVDECCFRSCDLRRLEMYCAPLKPAKSA

SEQ ID NO: 1610 - protein, 677 aa, Artificial Sequence
  Description of Artificial Sequence: Synthetic polypeptide
CGNLSTCMLGTYTQDFNKFHTFPQTAIGVGAPGGSPAGSPTSTEEGTSESATPESGPGTSTEPSEGSAPGSPAGSPTSTEEGTSTEPSEGSAPGTSTEPSEGSAPGTSESATPESGPGSEPATSGSETPGSEPATSGSETPGSPAGSPTSTEEGTSESATPESGPGTSTEPSEGSAPGTSTEPSEGSAPGSPAGSPTSTEEGTSTEPSEGSAPGTSTEPSEGSAPGTSESATPESGPGTSTEPSEGSAPGTSESATPESGPGSEPATSGSETPGTSTEPSEGSAPGTSTEPSEGSAPGTSESATPESGPGTSESATPESGPGSPAGSPTSTEEGTSESATPESGPGSEPATSGSETPGTSESATPESGPGTSTEPSEGSAPGTSTEPSEGSAPGTSTEPSEGSAPGTSTEPSEGSAPGTSTEPSEGSAPGTSTEPSEGSAPGSPAGSPTSTEEGTSTEPSEGSAPGTSESATPESGPGSEPATSGSETPGTSESATPESGPGSEPATSGSETPGTSESATPESGPGTSTEPSEGSAPGTSESATPESGPGSPAGSPTSTEEGSPAGSPTSTEEGSPAGSPTSTEEGTSESATPESGPGTSTEPSEGSAPGAYRPSETLCGGELVDTLQFVCGDRGFYFSRPASRVSRRSRGIVEECCFRSCDLALLETYCATPAKSE

SEQ ID NO: 1611 - protein, 759 aa, Artificial Sequence
  Description of Artificial Sequence: Synthetic polypeptide
CGNLSTCMLGTYTQDFNKFHTFPQTAIGVGAPGGSPAGSPTSTEEGTSESATPESGPGTSTEPSEGSAPGSPAGSPTSTEEGTSTEPSEGSAPGTSTEPSEGSAPGTSESATPESGPGSEPATSGSETPGSEPATSGSETPGSPAGSPTSTEEGTSESATPESGPGTSTEPSEGSAPGTSTEPSEGSAPGSPAGSPTSTEEGTSTEPSEGSAPGTSTEPSEGSAPGTSESATPESGPGTSTEPSEGSAPGTSESATPESGPGSEPATSGSETPGTSTEPSEGSAPGTSTEPSEGSAPGTSESATPESGPGTSESATPESGPGSPAGSPTSTEEGTSESATPESGPGSEPATSGSETPGTSESATPESGPGTSTEPSEGSAPGTSTEPSEGSAPGTSTEPSEGSAPGTSTEPSEGSAPGTSTEPSEGSAPGTSTEPSEGSAPGSPAGSPTSTEEGTSTEPSEGSAPGTSESATPESGPGSEPATSGSETPGTSESATPESGPGSEPATSGSETPGTSESATPESGPGTSTEPSEGSAPGTSESATPESGPGSPAGSPTSTEEGSPAGSPTSTEEGSPAGSPTSTEEGTSESATPESGPGTSTEPSEGSAPGEESQKKLPSSRITCPQGSVAYGSYCYSLILIPQTWSNAELSCQMHFSGHLAFLLSTGEITFVSSLVKNSLTAYQYIWIGLHDPSHGTLPNGSGWKWSSSNVLTFYNWERNPSIAADRGYCAVLSQKSGFQKWRDFNCENELPYICKFKV

SEQ ID NO: 1612 - protein, 657 aa, Artificial Sequence
  Description of Artificial Sequence: Synthetic polypeptide
CGNLSTCMLGTYTQDFNKFHTFPQTAIGVGAPGGSPAGSPTSTEEGTSESATPESGPGTSTEPSEGSAPGSPAGSPTSTEEGTSTEPSEGSAPGTSTEPSEGSAPGTSESATPESGPGSEPATSGSETPGSEPATSGSETPGSPAGSPTSTEEGTSESATPESGPGTSTEPSEGSAPGTSTEPSEGSAPGSPAGSPTSTEEGTSTEPSEGSAPGTSTEPSEGSAPGTSESATPESGPGTSTEPSEGSAPGTSESATPESGPGSEPATSGSETPGTSTEPSEGSAPGTSTEPSEGSAPGTSESATPESGPGTSESATPESGPGSPAGSPTSTEEGTSESATPESGPGSEPATSGSETPGTSESATPESGPGTSTEPSEGSAPGTSTEPSEGSAPGTSTEPSEGSAPGTSTEPSEGSAPGTSTEPSEGSAPGTSTEPSEGSAPGSPAGSPTSTEEGTSTEPSEGSAPGTSESATPESGPGSEPATSGSETPGTSESATPESGPGSEPATSGSETPGTSESATPESGPGTSTEPSEGSAPGTSESATPESGPGSPAGSPTSTEEGSPAGSPTSTEEGSPAGSPTSTEEGTSESATPESGPGTSTEPSEGSAPGTQAQLLRVGCVLGTCQVQNLSHRLWQLMGPAGRQDSAPVDPSSPHSY

SEQ ID NO: 1613 - protein, 756 aa, Artificial Sequence
  Description of Artificial Sequence: Synthetic polypeptide
CGNLSTCMLGTYTQDFNKFHTFPQTAIGVGAPGGSPAGSPTSTEEGTSESATPESGPGTSTEPSEGSAPGSPAGSPTSTEEGTSTEPSEGSAPGTSTEPSEGSAPGTSESATPESGPGSEPATSGSETPGSEPATSGSETPGSPAGSPTSTEEGTSESATPESGPGTSTEPSEGSAPGTSTEPSEGSAPGSPAGSPTSTEEGTSTEPSEGSAPGTSTEPSEGSAPGTSESATPESGPGTSTEPSEGSAPGTSESATPESGPGSEPATSGSETPGTSTEPSEGSAPGTSTEPSEGSAPGTSESATPESGPGTSESATPESGPGSPAGSPTSTEEGTSESATPESGPGSEPATSGSETPGTSESATPESGPGTSTEPSEGSAPGTSTEPSEGSAPGTSTEPSEGSAPGTSTEPSEGSAPGTSTEPSEGSAPGTSTEPSEGSAPGSPAGSPTSTEEGTSTEPSEGSAPGTSESATPESGPGSEPATSGSETPGTSESATPESGPGSEPATSGSETPGTSESATPESGPGTSTEPSEGSAPGTSESATPESGPGSPAGSPTSTEEGSPAGSPTSTEEGSPAGSPTSTEEGTSESATPESGPGTSTEPSEGSAPGVPIQKVQDDTKTLIKTIVTRINDISHTQSVSSKQKVTGLDFIPGLHPILTLSKMDQTLAVYQQILTSMPSRNVIQISNDLENLRDLLHVLAFSKSCHLPWASGLETLDSLGGVLEASGYSTEVVALSRLQGSLQDMLWQLDLSPGC

SEQ ID NO: 1614 - protein, 635 aa, Artificial Sequence
  Description of Artificial Sequence: Synthetic polypeptide
CGNLSTCMLGTYTQDFNKFHTFPQTAIGVGAPGGSPAGSPTSTEEGTSESATPESGPGTSTEPSEGSAPGSPAGSPTSTEEGTSTEPSEGSAPGTSTEPSEGSAPGTSESATPESGPGSEPATSGSETPGSEPATSGSETPGSPAGSPTSTEEGTSESATPESGPGTSTEPSEGSAPGTSTEPSEGSAPGSPAGSPTSTEEGTSTEPSEGSAPGTSTEPSEGSAPGTSESATPESGPGTSTEPSEGSAPGTSESATPESGPGSEPATSGSETPGTSTEPSEGSAPGTSTEPSEGSAPGTSESATPESGPGTSESATPESGPGSPAGSPTSTEEGTSESATPESGPGSEPATSGSETPGTSESATPESGPGTSTEPSEGSAPGTSTEPSEGSAPGTSTEPSEGSAPGTSTEPSEGSAPGTSTEPSEGSAPGTSTEPSEGSAPGSPAGSPTSTEEGTSTEPSEGSAPGTSESATPESGPGSEPATSGSETPGTSESATPESGPGSEPATSGSETPGTSESATPESGPGTSTEPSEGSAPGTSESATPESGPGSPAGSPTSTEEGSPAGSPTSTEEGSPAGSPTSTEEGTSESATPESGPGTSTEPSEGSAPGFRVDEEFQSPFASQSRGYFLFRPRN

SEQ ID NO: 1615 - protein, 647 aa, Artificial Sequence
  Description of Artificial Sequence: Synthetic polypeptide
CGNLSTCMLGTYTQDFNKFHTFPQTAIGVGAPGGSPAGSPTSTEEGTSESATPESGPGTSTEPSEGSAPGSPAGSPTSTEEGTSTEPSEGSAPGTSTEPSEGSAPGTSESATPESGPGSEPATSGSETPGSEPATSGSETPGSPAGSPTSTEEGTSESATPESGPGTSTEPSEGSAPGTSTEPSEGSAPGSPAGSPTSTEEGTSTEPSEGSAPGTSTEPSEGSAPGTSESATPESGPGTSTEPSEGSAPGTSESATPESGPGSEPATSGSETPGTSTEPSEGSAPGTSTEPSEGSAPGTSESATPESGPGTSESATPESGPGSPAGSPTSTEEGTSESATPESGPGSEPATSGSETPGTSESATPESGPGTSTEPSEGSAPGTSTEPSEGSAPGTSTEPSEGSAPGTSTEPSEGSAPGTSTEPSEGSAPGTSTEPSEGSAPGSPAGSPTSTEEGTSTEPSEGSAPGTSESATPESGPGSEPATSGSETPGTSESATPESGPGSEPATSGSETPGTSESATPESGPGTSTEPSEGSAPGTSESATPESGPGSPAGSPTSTEEGSPAGSPTSTEEGSPAGSPTSTEEGTSESATPESGPGTSTEPSEGSAPGHSQGTFTSDYSKYLDSRRAQDFVQWLMNTKRNRNNIA

SEQ ID NO: 1616 - protein, 647 aa, Artificial Sequence
  Description of Artificial Sequence: Synthetic polypeptide
CGNLSTCMLGTYTQDFNKFHTFPQTAIGVGAPGGSPAGSPTSTEEGTSESATPESGPGTSTEPSEGSAPGSPAGSPTSTEEGTSTEPSEGSAPGTSTEPSEGSAPGTSESATPESGPGSEPATSGSETPGSEPATSGSETPGSPAGSPTSTEEGTSESATPESGPGTSTEPSEGSAPGTSTEPSEGSAPGSPAGSPTSTEEGTSTEPSEGSAPGTSTEPSEGSAPGTSESATPESGPGTSTEPSEGSAPGTSESATPESGPGSEPATSGSETPGTSTEPSEGSAPGTSTEPSEGSAPGTSESATPESGPGTSESATPESGPGSPAGSPTSTEEGTSESATPESGPGSEPATSGSETPGTSESATPESGPGTSTEPSEGSAPGTSTEPSEGSAPGTSTEPSEGSAPGTSTEPSEGSAPGTSTEPSEGSAPGTSTEPSEGSAPGSPAGSPTSTEEGTSTEPSEGSAPGTSESATPESGPGSEPATSGSETPGTSESATPESGPGSEPATSGSETPGTSESATPESGPGTSTEPSEGSAPGTSESATPESGPGSPAGSPTSTEEGSPAGSPTSTEEGSPAGSPTSTEEGTSESATPESGPGTSTEPSEGSAPGKCNTATCATNRLANFLVHSSNNFGPILPPTNVGSNTY

SEQ ID NO: 1617 - protein, 646 aa, Artificial Sequence
  Description of Artificial Sequence: Synthetic polypeptide
CGNLSTCMLGTYTQDFNKFHTFPQTAIGVGAPGGSPAGSPTSTEEGTSESATPESGPGTSTEPSEGSAPGSPAGSPTSTEEGTSTEPSEGSAPGTSTEPSEGSAPGTSESATPESGPGSEPATSGSETPGSEPATSGSETPGSPAGSPTSTEEGTSESATPESGPGTSTEPSEGSAPGTSTEPSEGSAPGSPAGSPTSTEEGTSTEPSEGSAPGTSTEPSEGSAPGTSESATPESGPGTSTEPSEGSAPGTSESATPESGPGSEPATSGSETPGTSTEPSEGSAPGTSTEPSEGSAPGTSESATPESGPGTSESATPESGPGSPAGSPTSTEEGTSESATPESGPGSEPATSGSETPGTSESATPESGPGTSTEPSEGSAPGTSTEPSEGSAPGTSTEPSEGSAPGTSTEPSEGSAPGTSTEPSEGSAPGTSTEPSEGSAPGSPAGSPTSTEEGTSTEPSEGSAPGTSESATPESGPGSEPATSGSETPGTSESATPESGPGSEPATSGSETPGTSESATPESGPGTSTEPSEGSAPGTSESATPESGPGSPAGSPTSTEEGSPAGSPTSTEEGSPAGSPTSTEEGTSESATPESGPGTSTEPSEGSAPGYPIKPEAPGEDASPEELNRYYASLRHYLNLVTRQRY

SEQ ID NO: 1618 - protein, 651 aa, Artificial Sequence
  Description of Artificial Sequence: Synthetic polypeptide
CGNLSTCMLGTYTQDFNKFHTFPQTAIGVGAPGGSPAGSPTSTEEGTSESATPESGPGTSTEPSEGSAPGSPAGSPTSTEEGTSTEPSEGSAPGTSTEPSEGSAPGTSESATPESGPGSEPATSGSETPGSEPATSGSETPGSPAGSPTSTEEGTSESATPESGPGTSTEPSEGSAPGTSTEPSEGSAPGSPAGSPTSTEEGTSTEPSEGSAPGTSTEPSEGSAPGTSESATPESGPGTSTEPSEGSAPGTSESATPESGPGSEPATSGSETPGTSTEPSEGSAPGTSTEPSEGSAPGTSESATPESGPGTSESATPESGPGSPAGSPTSTEEGTSESATPESGPGSEPATSGSETPGTSESATPESGPGTSTEPSEGSAPGTSTEPSEGSAPGTSTEPSEGSAPGTSTEPSEGSAPGTSTEPSEGSAPGTSTEPSEGSAPGSPAGSPTSTEEGTSTEPSEGSAPGTSESATPESGPGSEPATSGSETPGTSESATPESGPGSEPATSGSETPGTSESATPESGPGTSTEPSEGSAPGTSESATPESGPGSPAGSPTSTEEGSPAGSPTSTEEGSPAGSPTSTEEGTSESATPESGPGTSTEPSEGSAPGIVLSLDVPIGLLQILLEQARARAAREQATTNARILARVGHC

SEQ ID NO: 1619 - protein, 648 aa, Artificial Sequence
  Description of Artificial Sequence: Synthetic polypeptide
CGNLSTCMLGTYTQDFNKFHTFPQTAIGVGAPGGSPAGSPTSTEEGTSESATPESGPGTSTEPSEGSAPGSPAGSPTSTEEGTSTEPSEGSAPGTSTEPSEGSAPGTSESATPESGPGSEPATSGSETPGSEPATSGSETPGSPAGSPTSTEEGTSESATPESGPGTSTEPSEGSAPGTSTEPSEGSAPGSPAGSPTSTEEGTSTEPSEGSAPGTSTEPSEGSAPGTSESATPESGPGTSTEPSEGSAPGTSESATPESGPGSEPATSGSETPGTSTEPSEGSAPGTSTEPSEGSAPGTSESATPESGPGTSESATPESGPGSPAGSPTSTEEGTSESATPESGPGSEPATSGSETPGTSESATPESGPGTSTEPSEGSAPGTSTEPSEGSAPGTSTEPSEGSAPGTSTEPSEGSAPGTSTEPSEGSAPGTSTEPSEGSAPGSPAGSPTSTEEGTSTEPSEGSAPGTSESATPESGPGSEPATSGSETPGTSESATPESGPGSEPATSGSETPGTSESATPESGPGTSTEPSEGSAPGTSESATPESGPGSPAGSPTSTEEGSPAGSPTSTEEGSPAGSPTSTEEGTSESATPESGPGTSTEPSEGSAPGFTLSLDVPTNIMNLLFNIAKAKNLRAQAAANAHLMAQI

SEQ ID NO: 1620 - protein, 646 aa, Artificial Sequence
  Description of Artificial Sequence: Synthetic polypeptide
ACDTATCVTHRLAGLLSRSGGVVKNMVPTNVGSKAFGGSPAGSPTSTEEGTSESATPESGPGTSTEPSEGSAPGSPAGSPTSTEEGTSTEPSEGSAPGTSTEPSEGSAPGTSESATPESGPGSEPATSGSETPGSEPATSGSETPGSPAGSPTSTEEGTSESATPESGPGTSTEPSEGSAPGTSTEPSEGSAPGSPAGSPTSTEEGTSTEPSEGSAPGTSTEPSEGSAPGTSESATPESGPGTSTEPSEGSAPGTSESATPESGPGSEPATSGSETPGTSTEPSEGSAPGTSTEPSEGSAPGTSESATPESGPGTSESATPESGPGSPAGSPTSTEEGTSESATPESGPGSEPATSGSETPGTSESATPESGPGTSTEPSEGSAPGTSTEPSEGSAPGTSTEPSEGSAPGTSTEPSEGSAPGTSTEPSEGSAPGTSTEPSEGSAPGSPAGSPTSTEEGTSTEPSEGSAPGTSESATPESGPGSEPATSGSETPGTSESATPESGPGSEPATSGSETPGTSESATPESGPGTSTEPSEGSAPGTSESATPESGPGSPAGSPTSTEEGSPAGSPTSTEEGSPAGSPTSTEEGTSESATPESGPGTSTEPSEGSAPGCGNLSTCMLGTYTQDFNKFHTFPQTAIGVGAP

SEQ ID NO: 1621 - protein, 643 aa, Artificial Sequence
  Description of Artificial Sequence: Synthetic polypeptide
KAPSGRMSIVKNLQNLDPSHRISDRDYMGWMDFGGSPAGSPTSTEEGTSESATPESGPGTSTEPSEGSAPGSPAGSPTSTEEGTSTEPSEGSAPGTSTEPSEGSAPGTSESATPESGPGSEPATSGSETPGSEPATSGSETPGSPAGSPTSTEEGTSESATPESGPGTSTEPSEGSAPGTSTEPSEGSAPGSPAGSPTSTEEGTSTEPSEGSAPGTSTEPSEGSAPGTSESATPESGPGTSTEPSEGSAPGTSESATPESGPGSEPATSGSETPGTSTEPSEGSAPGTSTEPSEGSAPGTSESATPESGPGTSESATPESGPGSPAGSPTSTEEGTSESATPESGPGSEPATSGSETPGTSESATPESGPGTSTEPSEGSAPGTSTEPSEGSAPGTSTEPSEGSAPGTSTEPSEGSAPGTSTEPSEGSAPGTSTEPSEGSAPGSPAGSPTSTEEGTSTEPSEGSAPGTSESATPESGPGSEPATSGSETPGTSESATPESGPGSEPATSGSETPGTSESATPESGPGTSTEPSEGSAPGTSESATPESGPGSPAGSPTSTEEGSPAGSPTSTEEGSPAGSPTSTEEGTSESATPESGPGTSTEPSEGSAPGCGNLSTCMLGTYTQDFNKFHTFPQTAIGVGAP

SEQ ID NO: 1622 - protein, 618 aa, Artificial Sequence
  Description of Artificial Sequence: Synthetic polypeptide
DYMGWMDFGGSPAGSPTSTEEGTSESATPESGPGTSTEPSEGSAPGSPAGSPTSTEEGTSTEPSEGSAPGTSTEPSEGSAPGTSESATPESGPGSEPATSGSETPGSEPATSGSETPGSPAGSPTSTEEGTSESATPESGPGTSTEPSEGSAPGTSTEPSEGSAPGSPAGSPTSTEEGTSTEPSEGSAPGTSTEPSEGSAPGTSESATPESGPGTSTEPSEGSAPGTSESATPESGPGSEPATSGSETPGTSTEPSEGSAPGTSTEPSEGSAPGTSESATPESGPGTSESATPESGPGSPAGSPTSTEEGTSESATPESGPGSEPATSGSETPGTSESATPESGPGTSTEPSEGSAPGTSTEPSEGSAPGTSTEPSEGSAPGTSTEPSEGSAPGTSTEPSEGSAPGTSTEPSEGSAPGSPAGSPTSTEEGTSTEPSEGSAPGTSESATPESGPGSEPATSGSETPGTSESATPESGPGSEPATSGSETPGTSESATPESGPGTSTEPSEGSAPGTSESATPESGPGSPAGSPTSTEEGSPAGSPTSTEEGSPAGSPTSTEEGTSESATPESGPGTSTEPSEGSAPGCGNLSTCMLGTYTQDFNKFHTFPQTAIGVGAP

SEQ ID NO: 1623 - protein, 649 aa, Artificial Sequence
  Description of Artificial Sequence: Synthetic polypeptide
HSDGTFTSDLSKQMEEEAVRLFIEWLKNGGPSSGAPPPSGGSPAGSPTSTEEGTSESATPESGPGTSTEPSEGSAPGSPAGSPTSTEEGTSTEPSEGSAPGTSTEPSEGSAPGTSESATPESGPGSEPATSGSETPGSEPATSGSETPGSPAGSPTSTEEGTSESATPESGPGTSTEPSEGSAPGTSTEPSEGSAPGSPAGSPTSTEEGTSTEPSEGSAPGTSTEPSEGSAPGTSESATPESGPGTSTEPSEGSAPGTSESATPESGPGSEPATSGSETPGTSTEPSEGSAPGTSTEPSEGSAPGTSESATPESGPGTSESATPESGPGSPAGSPTSTEEGTSESATPESGPGSEPATSGSETPGTSESATPESGPGTSTEPSEGSAPGTSTEPSEGSAPGTSTEPSEGSAPGTSTEPSEGSAPGTSTEPSEGSAPGTSTEPSEGSAPGSPAGSPTSTEEGTSTEPSEGSAPGTSESATPESGPGSEPATSGSETPGTSESATPESGPGSEPATSGSETPGTSESATPESGPGTSTEPSEGSAPGTSESATPESGPGSPAGSPTSTEEGSPAGSPTSTEEGSPAGSPTSTEEGTSESATPESGPGTSTEPSEGSAPGCGNLSTCMLGTYTQDFNKFHTFPQTAIGVGAP

SEQ ID NO: 1624 - protein, 649 aa, Artificial Sequence
  Description of Artificial Sequence: Synthetic polypeptide
HGEGTFTSDLSKQMEEEAVRLFIEWLKNGGPSSGAPPPSGGSPAGSPTSTEEGTSESATPESGPGTSTEPSEGSAPGSPAGSPTSTEEGTSTEPSEGSAPGTSTEPSEGSAPGTSESATPESGPGSEPATSGSETPGSEPATSGSETPGSPAGSPTSTEEGTSESATPESGPGTSTEPSEGSAPGTSTEPSEGSAPGSPAGSPTSTEEGTSTEPSEGSAPGTSTEPSEGSAPGTSESATPESGPGTSTEPSEGSAPGTSESATPESGPGSEPATSGSETPGTSTEPSEGSAPGTSTEPSEGSAPGTSESATPESGPGTSESATPESGPGSPAGSPTSTEEGTSESATPESGPGSEPATSGSETPGTSESATPESGPGTSTEPSEGSAPGTSTEPSEGSAPGTSTEPSEGSAPGTSTEPSEGSAPGTSTEPSEGSAPGTSTEPSEGSAPGSPAGSPTSTEEGTSTEPSEGSAPGTSESATPESGPGSEPATSGSETPGTSESATPESGPGSEPATSGSETPGTSESATPESGPGTSTEPSEGSAPGTSESATPESGPGSPAGSPTSTEEGSPAGSPTSTEEGSPAGSPTSTEEGTSESATPESGPGTSTEPSEGSAPGCGNLSTCMLGTYTQDFNKFHTFPQTAIGVGAP

SEQ ID NO: 1625 - protein, 826 aa, Artificial Sequence
  Description of Artificial Sequence: Synthetic polypeptide
MRSGCVVVHVWILAGLWLAVAGRPLAFSDAGPHVHYGWGDPIRLRHLYTSGPHGLSSCFLRIRADGVVDCARGQSAHSLLEIKAVALRTVAIKGVHSVRYLCMGADGKMQGLLQYSEEDCAFEEEIRPDGYNVYRSEKHRLPVSLSSAKQRQLYKNRGFLPLSHFLPMLPMVPEEPEDLRGHLESDMFSSPLETDSMDPFGLVTGLEAVRSPSFEKGGSPAGSPTSTEEGTSESATPESGPGTSTEPSEGSAPGSPAGSPTSTEEGTSTEPSEGSAPGTSTEPSEGSAPGTSESATPESGPGSEPATSGSETPGSEPATSGSETPGSPAGSPTSTEEGTSESATPESGPGTSTEPSEGSAPGTSTEPSEGSAPGSPAGSPTSTEEGTSTEPSEGSAPGTSTEPSEGSAPGTSESATPESGPGTSTEPSEGSAPGTSESATPESGPGSEPATSGSETPGTSTEPSEGSAPGTSTEPSEGSAPGTSESATPESGPGTSESATPESGPGSPAGSPTSTEEGTSESATPESGPGSEPATSGSETPGTSESATPESGPGTSTEPSEGSAPGTSTEPSEGSAPGTSTEPSEGSAPGTSTEPSEGSAPGTSTEPSEGSAPGTSTEPSEGSAPGSPAGSPTSTEEGTSTEPSEGSAPGTSESATPESGPGSEPATSGSETPGTSESATPESGPGSEPATSGSETPGTSESATPESGPGTSTEPSEGSAPGTSESATPESGPGSPAGSPTSTEEGSPAGSPTSTEEGSPAGSPTSTEEGTSESATPESGPGTSTEPSEGSAPGCGNLSTCMLGTYTQDFNKFHTFPQTAIGVGAP

SEQ ID NO: 1626 - protein, 819 aa, Artificial Sequence
  Description of Artificial Sequence: Synthetic polypeptide
MDSDETGFEHSGLWVSVLAGLLLGACQAHPIPDSSPLLQFGGQVRQRYLYTDDAQQTEAHLEIREDGTVGGAADQSPESLLQLKALKPGVIQILGVKTSRFLCQRPDGALYGSLHFDPEACSFRELLLEDGYNVYQSEAHGLPLHLPGNKSPHRDPAPRGPARFLPLPGLPPALPEPPGILAPQPPDVGSSDPLSMVGPSQGRSPSYASGGSPAGSPTSTEEGTSESATPESGPGTSTEPSEGSAPGSPAGSPTSTEEGTSTEPSEGSAPGTSTEPSEGSAPGTSESATPESGPGSEPATSGSETPGSEPATSGSETPGSPAGSPTSTEEGTSESATPESGPGTSTEPSEGSAPGTSTEPSEGSAPGSPAGSPTSTEEGTSTEPSEGSAPGTSTEPSEGSAPGTSESATPESGPGTSTEPSEGSAPGTSESATPESGPGSEPATSGSETPGTSTEPSEGSAPGTSTEPSEGSAPGTSESATPESGPGTSESATPESGPGSPAGSPTSTEEGTSESATPESGPGSEPATSGSETPGTSESATPESGPGTSTEPSEGSAPGTSTEPSEGSAPGTSTEPSEGSAPGTSTEPSEGSAPGTSTEPSEGSAPGTSTEPSEGSAPGSPAGSPTSTEEGTSTEPSEGSAPGTSESATPESGPGSEPATSGSETPGTSESATPESGPGSEPATSGSETPGTSESATPESGPGTSTEPSEGSAPGTSESATPESGPGSPAGSPTSTEEGSPAGSPTSTEEGSPAGSPTSTEEGTSESATPESGPGTSTEPSEGSAPGCGNLSTCMLGTYTQDFNKFHTFPQTAIGVGAP

SEQ ID NO: 1627 - protein, 644 aa, Artificial Sequence
  Description of Artificial Sequence: Synthetic polypeptide
QLGPQGPPHLVADPSKKQGPWLEEEEEAYGWMDFGGSPAGSPTSTEEGTSESATPESGPGTSTEPSEGSAPGSPAGSPTSTEEGTSTEPSEGSAPGTSTEPSEGSAPGTSESATPESGPGSEPATSGSETPGSEPATSGSETPGSPAGSPTSTEEGTSESATPESGPGTSTEPSEGSAPGTSTEPSEGSAPGSPAGSPTSTEEGTSTEPSEGSAPGTSTEPSEGSAPGTSESATPESGPGTSTEPSEGSAPGTSESATPESGPGSEPATSGSETPGTSTEPSEGSAPGTSTEPSEGSAPGTSESATPESGPGTSESATPESGPGSPAGSPTSTEEGTSESATPESGPGSEPATSGSETPGTSESATPESGPGTSTEPSEGSAPGTSTEPSEGSAPGTSTEPSEGSAPGTSTEPSEGSAPGTSTEPSEGSAPGTSTEPSEGSAPGSPAGSPTSTEEGTSTEPSEGSAPGTSESATPESGPGSEPATSGSETPGTSESATPESGPGSEPATSGSETPGTSESATPESGPGTSTEPSEGSAPGTSESATPESGPGSPAGSPTSTEEGSPAGSPTSTEEGSPAGSPTSTEEGTSESATPESGPGTSTEPSEGSAPGCGNLSTCMLGTYTQDFNKFHTFPQTAIGVGAP

SEQ ID NO: 1628 - protein, 632 aa, Artificial Sequence
  Description of Artificial Sequence: Synthetic polypeptide
DPSKKQGPWLEEEEEAYGWMDFGGSPAGSPTSTEEGTSESATPESGPGTSTEPSEGSAPGSPAGSPTSTEEGTSTEPSEGSAPGTSTEPSEGSAPGTSESATPESGPGSEPATSGSETPGSEPATSGSETPGSPAGSPTSTEEGTSESATPESGPGTSTEPSEGSAPGTSTEPSEGSAPGSPAGSPTSTEEGTSTEPSEGSAPGTSTEPSEGSAPGTSESATPESGPGTSTEPSEGSAPGTSESATPESGPGSEPATSGSETPGTSTEPSEGSAPGTSTEPSEGSAPGTSESATPESGPGTSESATPESGPGSPAGSPTSTEEGTSESATPESGPGSEPATSGSETPGTSESATPESGPGTSTEPSEGSAPGTSTEPSEGSAPGTSTEPSEGSAPGTSTEPSEGSAPGTSTEPSEGSAPGTSTEPSEGSAPGSPAGSPTSTEEGTSTEPSEGSAPGTSESATPESGPGSEPATSGSETPGTSESATPESGPGSEPATSGSETPGTSESATPESGPGTSTEPSEGSAPGTSESATPESGPGSPAGSPTSTEEGSPAGSPTSTEEGSPAGSPTSTEEGTSESATPESGPGTSTEPSEGSAPGCGNLSTCMLGTYTQDFNKFHTFPQTAIGVGAP

SEQ ID NO: 1629 - protein, 652 aa, Artificial Sequence
  Description of Artificial Sequence: Synthetic polypeptide
YAEGTFISDYSIAMDKIHQQDFVNWLLAQKGKKNDWKHNITQGGSPAGSPTSTEEGTSESATPESGPGTSTEPSEGSAPGSPAGSPTSTEEGTSTEPSEGSAPGTSTEPSEGSAPGTSESATPESGPGSEPATSGSETPGSEPATSGSETPGSPAGSPTSTEEGTSESATPESGPGTSTEPSEGSAPGTSTEPSEGSAPGSPAGSPTSTEEGTSTEPSEGSAPGTSTEPSEGSAPGTSESATPESGPGTSTEPSEGSAPGTSESATPESGPGSEPATSGSETPGTSTEPSEGSAPGTSTEPSEGSAPGTSESATPESGPGTSESATPESGPGSPAGSPTSTEEGTSESATPESGPGSEPATSGSETPGTSESATPESGPGTSTEPSEGSAPGTSTEPSEGSAPGTSTEPSEGSAPGTSTEPSEGSAPGTSTEPSEGSAPGTSTEPSEGSAPGSPAGSPTSTEEGTSTEPSEGSAPGTSESATPESGPGSEPATSGSETPGTSESATPESGPGSEPATSGSETPGTSESATPESGPGTSTEPSEGSAPGTSESATPESGPGSPAGSPTSTEEGSPAGSPTSTEEGSPAGSPTSTEEGTSESATPESGPGTSTEPSEGSAPGCGNLSTCMLGTYTQDFNKFHTFPQTAIGVGAP

SEQ ID NO: 1630 - protein, 639 aa, Artificial Sequence
  Description of Artificial Sequence: Synthetic polypeptide
HSQGTFTSDYSKYLDSRRAQDFVQWLMNTGGSPAGSPTSTEEGTSESATPESGPGTSTEPSEGSAPGSPAGSPTSTEEGTSTEPSEGSAPGTSTEPSEGSAPGTSESATPESGPGSEPATSGSETPGSEPATSGSETPGSPAGSPTSTEEGTSESATPESGPGTSTEPSEGSAPGTSTEPSEGSAPGSPAGSPTSTEEGTSTEPSEGSAPGTSTEPSEGSAPGTSESATPESGPGTSTEPSEGSAPGTSESATPESGPGSEPATSGSETPGTSTEPSEGSAPGTSTEPSEGSAPGTSESATPESGPGTSESATPESGPGSPAGSPTSTEEGTSESATPESGPGSEPATSGSETPGTSESATPESGPGTSTEPSEGSAPGTSTEPSEGSAPGTSTEPSEGSAPGTSTEPSEGSAPGTSTEPSEGSAPGTSTEPSEGSAPGSPAGSPTSTEEGTSTEPSEGSAPGTSESATPESGPGSEPATSGSETPGTSESATPESGPGSEPATSGSETPGTSESATPESGPGTSTEPSEGSAPGTSESATPESGPGSPAGSPTSTEEGSPAGSPTSTEEGSPAGSPTSTEEGTSESATPESGPGTSTEPSEGSAPGCGNLSTCMLGTYTQDFNKFHTFPQTAIGVGAP

SEQ ID NO: 1631 - protein, 647 aa, Artificial Sequence
  Description of Artificial Sequence: Synthetic polypeptide
HDEFERHAEGTFTSDVSSTLEGQAALEFIAWLVKGRGGGSPAGSPTSTEEGTSESATPESGPGTSTEPSEGSAPGSPAGSPTSTEEGTSTEPSEGSAPGTSTEPSEGSAPGTSESATPESGPGSEPATSGSETPGSEPATSGSETPGSPAGSPTSTEEGTSESATPESGPGTSTEPSEGSAPGTSTEPSEGSAPGSPAGSPTSTEEGTSTEPSEGSAPGTSTEPSEGSAPGTSESATPESGPGTSTEPSEGSAPGTSESATPESGPGSEPATSGSETPGTSTEPSEGSAPGTSTEPSEGSAPGTSESATPESGPGTSESATPESGPGSPAGSPTSTEEGTSESATPESGPGSEPATSGSETPGTSESATPESGPGTSTEPSEGSAPGTSTEPSEGSAPGTSTEPSEGSAPGTSTEPSEGSAPGTSTEPSEGSAPGTSTEPSEGSAPGSPAGSPTSTEEGTSTEPSEGSAPGTSESATPESGPGSEPATSGSETPGTSESATPESGPGSEPATSGSETPGTSESATPESGPGTSTEPSEGSAPGTSESATPESGPGSPAGSPTSTEEGSPAGSPTSTEEGSPAGSPTSTEEGTSESATPESGPGTSTEPSEGSAPGCGNLSTCMLGTYTQDFNKFHTFPQTAIGVGAP

SEQ ID NO: 1632 - protein, 640 aa, Artificial Sequence
  Description of Artificial Sequence: Synthetic polypeptide
HAEGTFTSDVSSYLEGQAALEFIAWLVKGRGGSPAGSPTSTEEGTSESATPESGPGTSTEPSEGSAPGSPAGSPTSTEEGTSTEPSEGSAPGTSTEPSEGSAPGTSESATPESGPGSEPATSGSETPGSEPATSGSETPGSPAGSPTSTEEGTSESATPESGPGTSTEPSEGSAPGTSTEPSEGSAPGSPAGSPTSTEEGTSTEPSEGSAPGTSTEPSEGSAPGTSESATPESGPGTSTEPSEGSAPGTSESATPESGPGSEPATSGSETPGTSTEPSEGSAPGTSTEPSEGSAPGTSESATPESGPGTSESATPESGPGSPAGSPTSTEEGTSESATPESGPGSEPATSGSETPGTSESATPESGPGTSTEPSEGSAPGTSTEPSEGSAPGTSTEPSEGSAPGTSTEPSEGSAPGTSTEPSEGSAPGTSTEPSEGSAPGSPAGSPTSTEEGTSTEPSEGSAPGTSESATPESGPGSEPATSGSETPGTSESATPESGPGSEPATSGSETPGTSESATPESGPGTSTEPSEGSAPGTSESATPESGPGSPAGSPTSTEEGSPAGSPTSTEEGSPAGSPTSTEEGTSESATPESGPGTSTEPSEGSAPGCGNLSTCMLGTYTQDFNKFHTFPQTAIGVGAP

SEQ ID NO: 1633 - protein, 643 aa, Artificial Sequence
  Description of Artificial Sequence: Synthetic polypeptide
HADGSFSDEMNTILDNLAARDFINWLIETKITDGGSPAGSPTSTEEGTSESATPESGPGTSTEPSEGSAPGSPAGSPTSTEEGTSTEPSEGSAPGTSTEPSEGSAPGTSESATPESGPGSEPATSGSETPGSEPATSGSETPGSPAGSPTSTEEGTSESATPESGPGTSTEPSEGSAPGTSTEPSEGSAPGSPAGSPTSTEEGTSTEPSEGSAPGTSTEPSEGSAPGTSESATPESGPGTSTEPSEGSAPGTSESATPESGPGSEPATSGSETPGTSTEPSEGSAPGTSTEPSEGSAPGTSESATPESGPGTSESATPESGPGSPAGSPTSTEEGTSESATPESGPGSEPATSGSETPGTSESATPESGPGTSTEPSEGSAPGTSTEPSEGSAPGTSTEPSEGSAPGTSTEPSEGSAPGTSTEPSEGSAPGTSTEPSEGSAPGSPAGSPTSTEEGTSTEPSEGSAPGTSESATPESGPGSEPATSGSETPGTSESATPESGPGSEPATSGSETPGTSESATPESGPGTSTEPSEGSAPGTSESATPESGPGSPAGSPTSTEEGSPAGSPTSTEEGSPAGSPTSTEEGTSESATPESGPGTSTEPSEGSAPGCGNLSTCMLGTYTQDFNKFHTFPQTAIGVGAP

SEQ ID NO: 1634 - protein, 680 aa, Artificial Sequence
  Description of Artificial Sequence: Synthetic polypeptide
GPETLCGAELVDALQFVCGDRGFYFNKPTGYGSSSRRAPQTGIVDECCFRSCDLRRLEMYCAPLKPAKSAGGSPAGSPTSTEEGTSESATPESGPGTSTEPSEGSAPGSPAGSPTSTEEGTSTEPSEGSAPGTSTEPSEGSAPGTSESATPESGPGSEPATSGSETPGSEPATSGSETPGSPAGSPTSTEEGTSESATPESGPGTSTEPSEGSAPGTSTEPSEGSAPGSPAGSPTSTEEGTSTEPSEGSAPGTSTEPSEGSAPGTSESATPESGPGTSTEPSEGSAPGTSESATPESGPGSEPATSGSETPGTSTEPSEGSAPGTSTEPSEGSAPGTSESATPESGPGTSESATPESGPGSPAGSPTSTEEGTSESATPESGPGSEPATSGSETPGTSESATPESGPGTSTEPSEGSAPGTSTEPSEGSAPGTSTEPSEGSAPGTSTEPSEGSAPGTSTEPSEGSAPGTSTEPSEGSAPGSPAGSPTSTEEGTSTEPSEGSAPGTSESATPESGPGSEPATSGSETPGTSESATPESGPGSEPATSGSETPGTSESATPESGPGTSTEPSEGSAPGTSESATPESGPGSPAGSPTSTEEGSPAGSPTSTEEGSPAGSPTSTEEGTSESATPESGPGTSTEPSEGSAPGCGNLSTCMLGTYTQDFNKFHTFPQTAIGVGAP

SEQ ID NO: 1635 - protein, 677 aa, Artificial Sequence
  Description of Artificial Sequence: Synthetic polypeptide
AYRPSETLCGGELVDTLQFVCGDRGFYFSRPASRVSRRSRGIVEECCFRSCDLALLETYCATPAKSEGGSPAGSPTSTEEGTSESATPESGPGTSTEPSEGSAPGSPAGSPTSTEEGTSTEPSEGSAPGTSTEPSEGSAPGTSESATPESGPGSEPATSGSETPGSEPATSGSETPGSPAGSPTSTEEGTSESATPESGPGTSTEPSEGSAPGTSTEPSEGSAPGSPAGSPTSTEEGTSTEPSEGSAPGTSTEPSEGSAPGTSESATPESGPGTSTEPSEGSAPGTSESATPESGPGSEPATSGSETPGTSTEPSEGSAPGTSTEPSEGSAPGTSESATPESGPGTSESATPESGPGSPAGSPTSTEEGTSESATPESGPGSEPATSGSETPGTSESATPESGPGTSTEPSEGSAPGTSTEPSEGSAPGTSTEPSEGSAPGTSTEPSEGSAPGTSTEPSEGSAPGTSTEPSEGSAPGSPAGSPTSTEEGTSTEPSEGSAPGTSESATPESGPGSEPATSGSETPGTSESATPESGPGSEPATSGSETPGTSESATPESGPGTSTEPSEGSAPGTSESATPESGPGSPAGSPTSTEEGSPAGSPTSTEEGSPAGSPTSTEEGTSESATPESGPGTSTEPSEGSAPGCGNLSTCMLGTYTQDFNKFHTFPQTAIGVGAP

SEQ ID NO: 1636 - protein, 759 aa, Artificial Sequence
  Description of Artificial Sequence: Synthetic polypeptide
EESQKKLPSSRITCPQGSVAYGSYCYSLILIPQTWSNAELSCQMHFSGHLAFLLSTGEITFVSSLVKNSLTAYQYIWIGLHDPSHGTLPNGSGWKWSSSNVLTFYNWERNPSIAADRGYCAVLSQKSGFQKWRDFNCENELPYICKFKVGGSPAGSPTSTEEGTSESATPESGPGTSTEPSEGSAPGSPAGSPTSTEEGTSTEPSEGSAPGTSTEPSEGSAPGTSESATPESGPGSEPATSGSETPGSEPATSGSETPGSPAGSPTSTEEGTSESATPESGPGTSTEPSEGSAPGTSTEPSEGSAPGSPAGSPTSTEEGTSTEPSEGSAPGTSTEPSEGSAPGTSESATPESGPGTSTEPSEGSAPGTSESATPESGPGSEPATSGSETPGTSTEPSEGSAPGTSTEPSEGSAPGTSESATPESGPGTSESATPESGPGSPAGSPTSTEEGTSESATPESGPGSEPATSGSETPGTSESATPESGPGTSTEPSEGSAPGTSTEPSEGSAPGTSTEPSEGSAPGTSTEPSEGSAPGTSTEPSEGSAPGTSTEPSEGSAPGSPAGSPTSTEEGTSTEPSEGSAPGTSESATPESGPGSEPATSGSETPGTSESATPESGPGSEPATSGSETPGTSESATPESGPGTSTEPSEGSAPGTSESATPESGPGSPAGSPTSTEEGSPAGSPTSTEEGSPAGSPTSTEEGTSESATPESGPGTSTEPSEGSAPGCGNLSTCMLGTYTQDFNKFHTFPQTAIGVGAP

SEQ ID NO: 1637 - protein, 657 aa, Artificial Sequence
  Description of Artificial Sequence: Synthetic polypeptide
TQAQLLRVGCVLGTCQVQNLSHRLWQLMGPAGRQDSAPVDPSSPHSYGGSPAGSPTSTEEGTSESATPESGPGTSTEPSEGSAPGSPAGSPTSTEEGTSTEPSEGSAPGTSTEPSEGSAPGTSESATPESGPGSEPATSGSETPGSEPATSGSETPGSPAGSPTSTEEGTSESATPESGPGTSTEPSEGSAPGTSTEPSEGSAPGSPAGSPTSTEEGTSTEPSEGSAPGTSTEPSEGSAPGTSESATPESGPGTSTEPSEGSAPGTSESATPESGPGSEPATSGSETPGTSTEPSEGSAPGTSTEPSEGSAPGTSESATPESGPGTSESATPESGPGSPAGSPTSTEEGTSESATPESGPGSEPATSGSETPGTSESATPESGPGTSTEPSEGSAPGTSTEPSEGSAPGTSTEPSEGSAPGTSTEPSEGSAPGTSTEPSEGSAPGTSTEPSEGSAPGSPAGSPTSTEEGTSTEPSEGSAPGTSESATPESGPGSEPATSGSETPGTSESATPESGPGSEPATSGSETPGTSESATPESGPGTSTEPSEGSAPGTSESATPESGPGSPAGSPTSTEEGSPAGSPTSTEEGSPAGSPTSTEEGTSESATPESGPGTSTEPSEGSAPGCGNLSTCMLGTYTQDFNKFHTFPQTAIGVGAP

SEQ ID NO: 1638 - protein, 756 aa, Artificial Sequence
  Description of Artificial Sequence: Synthetic polypeptide
VPIQKVQDDTKTLIKTIVTRINDISHTQSVSSKQKVTGLDFIPGLHPILTLSKMDQTLAVYQQILTSMPSRNVIQISNDLENLRDLLHVLAFSKSCHLPWASGLETLDSLGGVLEASGYSTEVVALSRLQGSLQDMLWQLDLSPGCGGSPAGSPTSTEEGTSESATPESGPGTSTEPSEGSAPGSPAGSPTSTEEGTSTEPSEGSAPGTSTEPSEGSAPGTSESATPESGPGSEPATSGSETPGSEPATSGSETPGSPAGSPTSTEEGTSESATPESGPGTSTEPSEGSAPGTSTEPSEGSAPGSPAGSPTSTEEGTSTEPSEGSAPGTSTEPSEGSAPGTSESATPESGPGTSTEPSEGSAPGTSESATPESGPGSEPATSGSETPGTSTEPSEGSAPGTSTEPSEGSAPGTSESATPESGPGTSESATPESGPGSPAGSPTSTEEGTSESATPESGPGSEPATSGSETPGTSESATPESGPGTSTEPSEGSAPGTSTEPSEGSAPGTSTEPSEGSAPGTSTEPSEGSAPGTSTEPSEGSAPGTSTEPSEGSAPGSPAGSPTSTEEGTSTEPSEGSAPGTSESATPESGPGSEPATSGSETPGTSESATPESGPGSEPATSGSETPGTSESATPESGPGTSTEPSEGSAPGTSESATPESGPGSPAGSPTSTEEGSPAGSPTSTEEGSPAGSPTSTEEGTSESATPESGPGTSTEPSEGSAPGCGNLSTCMLGTYTQDFNKFHTFPQTAIGVGAP

SEQ ID NO: 1639 - protein, 635 aa, Artificial Sequence
  Description of Artificial Sequence: Synthetic polypeptide
FRVDEEFQSPFASQSRGYFLFRPRNGGSPAGSPTSTEEGTSESATPESGPGTSTEPSEGSAPGSPAGSPTSTEEGTSTEPSEGSAPGTSTEPSEGSAPGTSESATPESGPGSEPATSGSETPGSEPATSGSETPGSPAGSPTSTEEGTSESATPESGPGTSTEPSEGSAPGTSTEPSEGSAPGSPAGSPTSTEEGTSTEPSEGSAPGTSTEPSEGSAPGTSESATPESGPGTSTEPSEGSAPGTSESATPESGPGSEPATSGSETPGTSTEPSEGSAPGTSTEPSEGSAPGTSESATPESGPGTSESATPESGPGSPAGSPTSTEEGTSESATPESGPGSEPATSGSETPGTSESATPESGPGTSTEPSEGSAPGTSTEPSEGSAPGTSTEPSEGSAPGTSTEPSEGSAPGTSTEPSEGSAPGTSTEPSEGSAPGSPAGSPTSTEEGTSTEPSEGSAPGTSESATPESGPGSEPATSGSETPGTSESATPESGPGSEPATSGSETPGTSESATPESGPGTSTEPSEGSAPGTSESATPESGPGSPAGSPTSTEEGSPAGSPTSTEEGSPAGSPTSTEEGTSESATPESGPGTSTEPSEGSAPGCGNLSTCMLGTYTQDFNKFHTFPQTAIGVGAP

SEQ ID NO: 1640 - protein, 647 aa, Artificial Sequence
  Description of Artificial Sequence: Synthetic polypeptide
HSQGTFTSDYSKYLDSRRAQDFVQWLMNTKRNRNNIAGGSPAGSPTSTEEGTSESATPESGPGTSTEPSEGSAPGSPAGSPTSTEEGTSTEPSEGSAPGTSTEPSEGSAPGTSESATPESGPGSEPATSGSETPGSEPATSGSETPGSPAGSPTSTEEGTSESATPESGPGTSTEPSEGSAPGTSTEPSEGSAPGSPAGSPTSTEEGTSTEPSEGSAPGTSTEPSEGSAPGTSESATPESGPGTSTEPSEGSAPGTSESATPESGPGSEPATSGSETPGTSTEPSEGSAPGTSTEPSEGSAPGTSESATPESGPGTSESATPESGPGSPAGSPTSTEEGTSESATPESGPGSEPATSGSETPGTSESATPESGPGTSTEPSEGSAPGTSTEPSEGSAPGTSTEPSEGSAPGTSTEPSEGSAPGTSTEPSEGSAPGTSTEPSEGSAPGSPAGSPTSTEEGTSTEPSEGSAPGTSESATPESGPGSEPATSGSETPGTSESATPESGPGSEPATSGSETPGTSESATPESGPGTSTEPSEGSAPGTSESATPESGPGSPAGSPTSTEEGSPAGSPTSTEEGSPAGSPTSTEEGTSESATPESGPGTSTEPSEGSAPGCGNLSTCMLGTYTQDFNKFHTFPQTAIGVGAP

SEQ ID NO: 1641 - protein, 647 aa, Artificial Sequence
  Description of Artificial Sequence: Synthetic polypeptide
KCNTATCATNRLANFLVHSSNNFGPILPPTNVGSNTYGGSPAGSPTSTEEGTSESATPESGPGTSTEPSEGSAPGSPAGSPTSTEEGTSTEPSEGSAPGTSTEPSEGSAPGTSESATPESGPGSEPATSGSETPGSEPATSGSETPGSPAGSPTSTEEGTSESATPESGPGTSTEPSEGSAPGTSTEPSEGSAPGSPAGSPTSTEEGTSTEPSEGSAPGTSTEPSEGSAPGTSESATPESGPGTSTEPSEGSAPGTSESATPESGPGSEPATSGSETPGTSTEPSEGSAPGTSTEPSEGSAPGTSESATPESGPGTSESATPESGPGSPAGSPTSTEEGTSESATPESGPGSEPATSGSETPGTSESATPESGPGTSTEPSEGSAPGTSTEPSEGSAPGTSTEPSEGSAPGTSTEPSEGSAPGTSTEPSEGSAPGTSTEPSEGSAPGSPAGSPTSTEEGTSTEPSEGSAPGTSESATPESGPGSEPATSGSETPGTSESATPESGPGSEPATSGSETPGTSESATPESGPGTSTEPSEGSAPGTSESATPESGPGSPAGSPTSTEEGSPAGSPTSTEEGSPAGSPTSTEEGTSESATPESGPGTSTEPSEGSAPGCGNLSTCMLGTYTQDFNKFHTFPQTAIGVGAP

SEQ ID NO: 1642 - protein, 646 aa, Artificial Sequence
  Description of Artificial Sequence: Synthetic polypeptide
YPIKPEAPGEDASPEELNRYYASLRHYLNLVTRQRYGGSPAGSPTSTEEGTSESATPESGPGTSTEPSEGSAPGSPAGSPTSTEEGTSTEPSEGSAPGTSTEPSEGSAPGTSESATPESGPGSEPATSGSETPGSEPATSGSETPGSPAGSPTSTEEGTSESATPESGPGTSTEPSEGSAPGTSTEPSEGSAPGSPAGSPTSTEEGTSTEPSEGSAPGTSTEPSEGSAPGTSESATPESGPGTSTEPSEGSAPGTSESATPESGPGSEPATSGSETPGTSTEPSEGSAPGTSTEPSEGSAPGTSESATPESGPGTSESATPESGPGSPAGSPTSTEEGTSESATPESGPGSEPATSGSETPGTSESATPESGPGTSTEPSEGSAPGTSTEPSEGSAPGTSTEPSEGSAPGTSTEPSEGSAPGTSTEPSEGSAPGTSTEPSEGSAPGSPAGSPTSTEEGTSTEPSEGSAPGTSESATPESGPGSEPATSGSETPGTSESATPESGPGSEPATSGSETPGTSESATPESGPGTSTEPSEGSAPGTSESATPESGPGSPAGSPTSTEEGSPAGSPTSTEEGSPAGSPTSTEEGTSESATPESGPGTSTEPSEGSAPGCGNLSTCMLGTYTQDFNKFHTFPQTAIGVGAP

SEQ ID NO: 1643 - protein, 651 aa, Artificial Sequence
  Description of Artificial Sequence: Synthetic polypeptide
IVLSLDVPIGLLQILLEQARARAAREQATTNARILARVGHCGGSPAGSPTSTEEGTSESATPESGPGTSTEPSEGSAPGSPAGSPTSTEEGTSTEPSEGSAPGTSTEPSEGSAPGTSESATPESGPGSEPATSGSETPGSEPATSGSETPGSPAGSPTSTEEGTSESATPESGPGTSTEPSEGSAPGTSTEPSEGSAPGSPAGSPTSTEEGTSTEPSEGSAPGTSTEPSEGSAPGTSESATPESGPGTSTEPSEGSAPGTSESATPESGPGSEPATSGSETPGTSTEPSEGSAPGTSTEPSEGSAPGTSESATPESGPGTSESATPESGPGSPAGSPTSTEEGTSESATPESGPGSEPATSGSETPGTSESATPESGPGTSTEPSEGSAPGTSTEPSEGSAPGTSTEPSEGSAPGTSTEPSEGSAPGTSTEPSEGSAPGTSTEPSEGSAPGSPAGSPTSTEEGTSTEPSEGSAPGTSESATPESGPGSEPATSGSETPGTSESATPESGPGSEPATSGSETPGTSESATPESGPGTSTEPSEGSAPGTSESATPESGPGSPAGSPTSTEEGSPAGSPTSTEEGSPAGSPTSTEEGTSESATPESGPGTSTEPSEGSAPGCGNLSTCMLGTYTQDFNKFHTFPQTAIGVGAP

SEQ ID NO: 1644 - protein, 648 aa, Artificial Sequence
  Description of Artificial Sequence: Synthetic polypeptide
FTLSLDVPTNIMNLLFNIAKAKNLRAQAAANAHLMAQIGGSPAGSPTSTEEGTSESATPESGPGTSTEPSEGSAPGSPAGSPTSTEEGTSTEPSEGSAPGTSTEPSEGSAPGTSESATPESGPGSEPATSGSETPGSEPATSGSETPGSPAGSPTSTEEGTSESATPESGPGTSTEPSEGSAPGTSTEPSEGSAPGSPAGSPTSTEEGTSTEPSEGSAPGTSTEPSEGSAPGTSESATPESGPGTSTEPSEGSAPGTSESATPESGPGSEPATSGSETPGTSTEPSEGSAPGTSTEPSEGSAPGTSESATPESGPGTSESATPESGPGSPAGSPTSTEEGTSESATPESGPGSEPATSGSETPGTSESATPESGPGTSTEPSEGSAPGTSTEPSEGSAPGTSTEPSEGSAPGTSTEPSEGSAPGTSTEPSEGSAPGTSTEPSEGSAPGSPAGSPTSTEEGTSTEPSEGSAPGTSESATPESGPGSEPATSGSETPGTSESATPESGPGSEPATSGSETPGTSESATPESGPGTSTEPSEGSAPGTSESATPESGPGSPAGSPTSTEEGSPAGSPTSTEEGSPAGSPTSTEEGTSESATPESGPGTSTEPSEGSAPGCGNLSTCMLGTYTQDFNKFHTFPQTAIGVGAP

SEQ ID NO: 1645 - protein, 647 aa, Artificial Sequence
  Description of Artificial Sequence: Synthetic polypeptide
ACDTATCVTHRLAGLLSRSGGVVKNMVPTNVGSKAFGGSPAGSPTSTEEGTSESATPESGPGTSTEPSEGSAPGSPAGSPTSTEEGTSTEPSEGSAPGTSTEPSEGSAPGTSESATPESGPGSEPATSGSETPGSEPATSGSETPGSPAGSPTSTEEGTSESATPESGPGTSTEPSEGSAPGTSTEPSEGSAPGSPAGSPTSTEEGTSTEPSEGSAPGTSTEPSEGSAPGTSESATPESGPGTSTEPSEGSAPGTSESATPESGPGSEPATSGSETPGTSTEPSEGSAPGTSTEPSEGSAPGTSESATPESGPGTSESATPESGPGSPAGSPTSTEEGTSESATPESGPGSEPATSGSETPGTSESATPESGPGTSTEPSEGSAPGTSTEPSEGSAPGTSTEPSEGSAPGTSTEPSEGSAPGTSTEPSEGSAPGTSTEPSEGSAPGSPAGSPTSTEEGTSTEPSEGSAPGTSESATPESGPGSEPATSGSETPGTSESATPESGPGSEPATSGSETPGTSESATPESGPGTSTEPSEGSAPGTSESATPESGPGSPAGSPTSTEEGSPAGSPTSTEEGSPAGSPTSTEEGTSESATPESGPGTSTEPSEGSAPGKAPSGRMSIVKNLQNLDPSHRISDRDYMGWMDF

SEQ ID NO: 1646 - protein, 622 aa, Artificial Sequence
  Description of Artificial Sequence: Synthetic polypeptide
ACDTATCVTHRLAGLLSRSGGVVKNMVPTNVGSKAFGGSPAGSPTSTEEGTSESATPESGPGTSTEPSEGSAPGSPAGSPTSTEEGTSTEPSEGSAPGTSTEPSEGSAPGTSESATPESGPGSEPATSGSETPGSEPATSGSETPGSPAGSPTSTEEGTSESATPESGPGTSTEPSEGSAPGTSTEPSEGSAPGSPAGSPTSTEEGTSTEPSEGSAPGTSTEPSEGSAPGTSESATPESGPGTSTEPSEGSAPGTSESATPESGPGSEPATSGSETPGTSTEPSEGSAPGTSTEPSEGSAPGTSESATPESGPGTSESATPESGPGSPAGSPTSTEEGTSESATPESGPGSEPATSGSETPGTSESATPESGPGTSTEPSEGSAPGTSTEPSEGSAPGTSTEPSEGSAPGTSTEPSEGSAPGTSTEPSEGSAPGTSTEPSEGSAPGSPAGSPTSTEEGTSTEPSEGSAPGTSESATPESGPGSEPATSGSETPGTSESATPESGPGSEPATSGSETPGTSESATPESGPGTSTEPSEGSAPGTSESATPESGPGSPAGSPTSTEEGSPAGSPTSTEEGSPAGSPTSTEEGTSESATPESGPGTSTEPSEGSAPGDYMGWMDF

SEQ ID NO: 1647 - protein, 653 aa, Artificial Sequence
  Description of Artificial Sequence: Synthetic polypeptide
ACDTATCVTHRLAGLLSRSGGVVKNMVPTNVGSKAFGGSPAGSPTSTEEGTSESATPESGPGTSTEPSEGSAPGSPAGSPTSTEEGTSTEPSEGSAPGTSTEPSEGSAPGTSESATPESGPGSEPATSGSETPGSEPATSGSETPGSPAGSPTSTEEGTSESATPESGPGTSTEPSEGSAPGTSTEPSEGSAPGSPAGSPTSTEEGTSTEPSEGSAPGTSTEPSEGSAPGTSESATPESGPGTSTEPSEGSAPGTSESATPESGPGSEPATSGSETPGTSTEPSEGSAPGTSTEPSEGSAPGTSESATPESGPGTSESATPESGPGSPAGSPTSTEEGTSESATPESGPGSEPATSGSETPGTSESATPESGPGTSTEPSEGSAPGTSTEPSEGSAPGTSTEPSEGSAPGTSTEPSEGSAPGTSTEPSEGSAPGTSTEPSEGSAPGSPAGSPTSTEEGTSTEPSEGSAPGTSESATPESGPGSEPATSGSETPGTSESATPESGPGSEPATSGSETPGTSESATPESGPGTSTEPSEGSAPGTSESATPESGPGSPAGSPTSTEEGSPAGSPTSTEEGSPAGSPTSTEEGTSESATPESGPGTSTEPSEGSAPGHSDGTFTSDLSKQMEEEAVRLFIEWLKNGGPSSGAPPPS

SEQ ID NO: 1648 - protein, 653 aa, Artificial Sequence
  Description of Artificial Sequence: Synthetic polypeptide
ACDTATCVTHRLAGLLSRSGGVVKNMVPTNVGSKAFGGSPAGSPTSTEEGTSESATPESGPGTSTEPSEGSAPGSPAGSPTSTEEGTSTEPSEGSAPGTSTEPSEGSAPGTSESATPESGPGSEPATSGSETPGSEPATSGSETPGSPAGSPTSTEEGTSESATPESGPGTSTEPSEGSAPGTSTEPSEGSAPGSPAGSPTSTEEGTSTEPSEGSAPGTSTEPSEGSAPGTSESATPESGPGTSTEPSEGSAPGTSESATPESGPGSEPATSGSETPGTSTEPSEGSAPGTSTEPSEGSAPGTSESATPESGPGTSESATPESGPGSPAGSPTSTEEGTSESATPESGPGSEPATSGSETPGTSESATPESGPGTSTEPSEGSAPGTSTEPSEGSAPGTSTEPSEGSAPGTSTEPSEGSAPGTSTEPSEGSAPGTSTEPSEGSAPGSPAGSPTSTEEGTSTEPSEGSAPGTSESATPESGPGSEPATSGSETPGTSESATPESGPGSEPATSGSETPGTSESATPESGPGTSTEPSEGSAPGTSESATPESGPGSPAGSPTSTEEGSPAGSPTSTEEGSPAGSPTSTEEGTSESATPESGPGTSTEPSEGSAPGHGEGTFTSDLSKQMEEEAVRLFIEWLKNGGPSSGAPPPS

SEQ ID NO: 1649 - protein, 830 aa, Artificial Sequence
  Description of Artificial Sequence: Synthetic polypeptide
ACDTATCVTHRLAGLLSRSGGVVKNMVPTNVGSKAFGGSPAGSPTSTEEGTSESATPESGPGTSTEPSEGSAPGSPAGSPTSTEEGTSTEPSEGSAPGTSTEPSEGSAPGTSESATPESGPGSEPATSGSETPGSEPATSGSETPGSPAGSPTSTEEGTSESATPESGPGTSTEPSEGSAPGTSTEPSEGSAPGSPAGSPTSTEEGTSTEPSEGSAPGTSTEPSEGSAPGTSESATPESGPGTSTEPSEGSAPGTSESATPESGPGSEPATSGSETPGTSTEPSEGSAPGTSTEPSEGSAPGTSESATPESGPGTSESATPESGPGSPAGSPTSTEEGTSESATPESGPGSEPATSGSETPGTSESATPESGPGTSTEPSEGSAPGTSTEPSEGSAPGTSTEPSEGSAPGTSTEPSEGSAPGTSTEPSEGSAPGTSTEPSEGSAPGSPAGSPTSTEEGTSTEPSEGSAPGTSESATPESGPGSEPATSGSETPGTSESATPESGPGSEPATSGSETPGTSESATPESGPGTSTEPSEGSAPGTSESATPESGPGSPAGSPTSTEEGSPAGSPTSTEEGSPAGSPTSTEEGTSESATPESGPGTSTEPSEGSAPGMRSGCVVVHVWILAGLWLAVAGRPLAFSDAGPHVHYGWGDPIRLRHLYTSGPHGLSSCFLRIRADGVVDCARGQSAHSLLEIKAVALRTVAIKGVHSVRYLCMGADGKMQGLLQYSEEDCAFEEEIRPDGYNVYRSEKHRLPVSLSSAKQRQLYKNRGFLPLSHFLPMLPMVPEEPEDLRGHLESDMFSSPLETDSMDPFGLVTGLEAVRSPSFEK

SEQ ID NO: 1650 - protein, 823 aa, Artificial Sequence
  Description of Artificial Sequence: Synthetic polypeptide
ACDTATCVTHRLAGLLSRSGGVVKNMVPTNVGSKAFGGSPAGSPTSTEEGTSESATPESGPGTSTEPSEGSAPGSPAGSPTSTEEGTSTEPSEGSAPGTSTEPSEGSAPGTSESATPESGPGSEPATSGSETPGSEPATSGSETPGSPAGSPTSTEEGTSESATPESGPGTSTEPSEGSAPGTSTEPSEGSAPGSPAGSPTSTEEGTSTEPSEGSAPGTSTEPSEGSAPGTSESATPESGPGTSTEPSEGSAPGTSESATPESGPGSEPATSGSETPGTSTEPSEGSAPGTSTEPSEGSAPGTSESATPESGPGTSESATPESGPGSPAGSPTSTEEGTSESATPESGPGSEPATSGSETPGTSESATPESGPGTSTEPSEGSAPGTSTEPSEGSAPGTSTEPSEGSAPGTSTEPSEGSAPGTSTEPSEGSAPGTSTEPSEGSAPGSPAGSPTSTEEGTSTEPSEGSAPGTSESATPESGPGSEPATSGSETPGTSESATPESGPGSEPATSGSETPGTSESATPESGPGTSTEPSEGSAPGTSESATPESGPGSPAGSPTSTEEGSPAGSPTSTEEGSPAGSPTSTEEGTSESATPESGPGTSTEPSEGSAPGMDSDETGFEHSGLWVSVLAGLLLGACQAHPIPDSSPLLQFGGQVRQRYLYTDDAQQTEAHLEIREDGTVGGAADQSPESLLQLKALKPGVIQILGVKTSRFLCQRPDGALYGSLHFDPEACSFRELLLEDGYNVYQSEAHGLPLHLPGNKSPHRDPAPRGPARFLPLPGLPPALPEPPGILAPQPPDVGSSDPLSMVGPSQGRSPSYAS

SEQ ID NO: 1651 - protein, 648 aa, Artificial Sequence
  Description of Artificial Sequence: Synthetic polypeptide
ACDTATCVTHRLAGLLSRSGGVVKNMVPTNVGSKAFGGSPAGSPTSTEEGTSESATPESGPGTSTEPSEGSAPGSPAGSPTSTEEGTSTEPSEGSAPGTSTEPSEGSAPGTSESATPESGPGSEPATSGSETPGSEPATSGSETPGSPAGSPTSTEEGTSESATPESGPGTSTEPSEGSAPGTSTEPSEGSAPGSPAGSPTSTEEGTSTEPSEGSAPGTSTEPSEGSAPGTSESATPESGPGTSTEPSEGSAPGTSESATPESGPGSEPATSGSETPGTSTEPSEGSAPGTSTEPSEGSAPGTSESATPESGPGTSESATPESGPGSPAGSPTSTEEGTSESATPESGPGSEPATSGSETPGTSESATPESGPGTSTEPSEGSAPGTSTEPSEGSAPGTSTEPSEGSAPGTSTEPSEGSAPGTSTEPSEGSAPGTSTEPSEGSAPGSPAGSPTSTEEGTSTEPSEGSAPGTSESATPESGPGSEPATSGSETPGTSESATPESGPGSEPATSGSETPGTSESATPESGPGTSTEPSEGSAPGTSESATPESGPGSPAGSPTSTEEGSPAGSPTSTEEGSPAGSPTSTEEGTSESATPESGPGTSTEPSEGSAPGQLGPQGPPHLVADPSKKQGPWLEEEEEAYGWMDF

SEQ ID NO: 1652 - protein, 636 aa, Artificial Sequence
  Description of Artificial Sequence: Synthetic polypeptide
ACDTATCVTHRLAGLLSRSGGVVKNMVPTNVGSKAFGGSPAGSPTSTEEGTSESATPESGPGTSTEPSEGSAPGSPAGSPTSTEEGTSTEPSEGSAPGTSTEPSEGSAPGTSESATPESGPGSEPATSGSETPGSEPATSGSETPGSPAGSPTSTEEGTSESATPESGPGTSTEPSEGSAPGTSTEPSEGSAPGSPAGSPTSTEEGTSTEPSEGSAPGTSTEPSEGSAPGTSESATPESGPGTSTEPSEGSAPGTSESATPESGPGSEPATSGSETPGTSTEPSEGSAPGTSTEPSEGSAPGTSESATPESGPGTSESATPESGPGSPAGSPTSTEEGTSESATPESGPGSEPATSGSETPGTSESATPESGPGTSTEPSEGSAPGTSTEPSEGSAPGTSTEPSEGSAPGTSTEPSEGSAPGTSTEPSEGSAPGTSTEPSEGSAPGSPAGSPTSTEEGTSTEPSEGSAPGTSESATPESGPGSEPATSGSETPGTSESATPESGPGSEPATSGSETPGTSESATPESGPGTSTEPSEGSAPGTSESATPESGPGSPAGSPTSTEEGSPAGSPTSTEEGSPAGSPTSTEEGTSESATPESGPGTSTEPSEGSAPGDPSKKQGPWLEEEEEAYGWMDF

SEQ ID NO: 1653 - protein, 656 aa, Artificial Sequence
  Description of Artificial Sequence: Synthetic polypeptide
ACDTATCVTHRLAGLLSRSGGVVKNMVPTNVGSKAFGGSPAGSPTSTEEGTSESATPESGPGTSTEPSEGSAPGSPAGSPTSTEEGTSTEPSEGSAPGTSTEPSEGSAPGTSESATPESGPGSEPATSGSETPGSEPATSGSETPGSPAGSPTSTEEGTSESATPESGPGTSTEPSEGSAPGTSTEPSEGSAPGSPAGSPTSTEEGTSTEPSEGSAPGTSTEPSEGSAPGTSESATPESGPGTSTEPSEGSAPGTSESATPESGPGSEPATSGSETPGTSTEPSEGSAPGTSTEPSEGSAPGTSESATPESGPGTSESATPESGPGSPAGSPTSTEEGTSESATPESGPGSEPATSGSETPGTSESATPESGPGTSTEPSEGSAPGTSTEPSEGSAPGTSTEPSEGSAPGTSTEPSEGSAPGTSTEPSEGSAPGTSTEPSEGSAPGSPAGSPTSTEEGTSTEPSEGSAPGTSESATPESGPGSEPATSGSETPGTSESATPESGPGSEPATSGSETPGTSESATPESGPGTSTEPSEGSAPGTSESATPESGPGSPAGSPTSTEEGSPAGSPTSTEEGSPAGSPTSTEEGTSESATPESGPGTSTEPSEGSAPGYAEGTFISDYSIAMDKIHQQDFVNWLLAQKGKKNDWKHNITQ

SEQ ID NO: 1654 - protein, 643 aa, Artificial Sequence
  Description of Artificial Sequence: Synthetic polypeptide
ACDTATCVTHRLAGLLSRSGGVVKNMVPTNVGSKAFGGSPAGSPTSTEEGTSESATPESGPGTSTEPSEGSAPGSPAGSPTSTEEGTSTEPSEGSAPGTSTEPSEGSAPGTSESATPESGPGSEPATSGSETPGSEPATSGSETPGSPAGSPTSTEEGTSESATPESGPGTSTEPSEGSAPGTSTEPSEGSAPGSPAGSPTSTEEGTSTEPSEGSAPGTSTEPSEGSAPGTSESATPESGPGTSTEPSEGSAPGTSESATPESGPGSEPATSGSETPGTSTEPSEGSAPGTSTEPSEGSAPGTSESATPESGPGTSESATPESGPGSPAGSPTSTEEGTSESATPESGPGSEPATSGSETPGTSESATPESGPGTSTEPSEGSAPGTSTEPSEGSAPGTSTEPSEGSAPGTSTEPSEGSAPGTSTEPSEGSAPGTSTEPSEGSAPGSPAGSPTSTEEGTSTEPSEGSAPGTSESATPESGPGSEPATSGSETPGTSESATPESGPGSEPATSGSETPGTSESATPESGPGTSTEPSEGSAPGTSESATPESGPGSPAGSPTSTEEGSPAGSPTSTEEGSPAGSPTSTEEGTSESATPESGPGTSTEPSEGSAPGHSQGTFTSDYSKYLDSRRAQDFVQWLMNT

SEQ ID NO: 1655 - protein, 651 aa, Artificial Sequence
  Description of Artificial Sequence: Synthetic polypeptide
ACDTATCVTHRLAGLLSRSGGVVKNMVPTNVGSKAFGGSPAGSPTSTEEGTSESATPESGPGTSTEPSEGSAPGSPAGSPTSTEEGTSTEPSEGSAPGTSTEPSEGSAPGTSESATPESGPGSEPATSGSETPGSEPATSGSETPGSPAGSPTSTEEGTSESATPESGPGTSTEPSEGSAPGTSTEPSEGSAPGSPAGSPTSTEEGTSTEPSEGSAPGTSTEPSEGSAPGTSESATPESGPGTSTEPSEGSAPGTSESATPESGPGSEPATSGSETPGTSTEPSEGSAPGTSTEPSEGSAPGTSESATPESGPGTSESATPESGPGSPAGSPTSTEEGTSESATPESGPGSEPATSGSETPGTSESATPESGPGTSTEPSEGSAPGTSTEPSEGSAPGTSTEPSEGSAPGTSTEPSEGSAPGTSTEPSEGSAPGTSTEPSEGSAPGSPAGSPTSTEEGTSTEPSEGSAPGTSESATPESGPGSEPATSGSETPGTSESATPESGPGSEPATSGSETPGTSESATPESGPGTSTEPSEGSAPGTSESATPESGPGSPAGSPTSTEEGSPAGSPTSTEEGSPAGSPTSTEEGTSESATPESGPGTSTEPSEGSAPGHDEFERHAEGTFTSDVSSTLEGQAALEFIAWLVKGRG

SEQ ID NO: 1656 - protein, 644 aa, Artificial Sequence
  Description of Artificial Sequence: Synthetic polypeptide
ACDTATCVTHRLAGLLSRSGGVVKNMVPTNVGSKAFGGSPAGSPTSTEEGTSESATPESGPGTSTEPSEGSAPGSPAGSPTSTEEGTSTEPSEGSAPGTSTEPSEGSAPGTSESATPESGPGSEPATSGSETPGSEPATSGSETPGSPAGSPTSTEEGTSESATPESGPGTSTEPSEGSAPGTSTEPSEGSAPGSPAGSPTSTEEGTSTEPSEGSAPGTSTEPSEGSAPGTSESATPESGPGTSTEPSEGSAPGTSESATPESGPGSEPATSGSETPGTSTEPSEGSAPGTSTEPSEGSAPGTSESATPESGPGTSESATPESGPGSPAGSPTSTEEGTSESATPESGPGSEPATSGSETPGTSESATPESGPGTSTEPSEGSAPGTSTEPSEGSAPGTSTEPSEGSAPGTSTEPSEGSAPGTSTEPSEGSAPGTSTEPSEGSAPGSPAGSPTSTEEGTSTEPSEGSAPGTSESATPESGPGSEPATSGSETPGTSESATPESGPGSEPATSGSETPGTSESATPESGPGTSTEPSEGSAPGTSESATPESGPGSPAGSPTSTEEGSPAGSPTSTEEGSPAGSPTSTEEGTSESATPESGPGTSTEPSEGSAPGHAEGTFTSDVSSYLEGQAALEFIAWLVKGR

SEQ ID NO: 1657 - protein, 647 aa, Artificial Sequence
  Description of Artificial Sequence: Synthetic polypeptide
ACDTATCVTHRLAGLLSRSGGVVKNMVPTNVGSKAFGGSPAGSPTSTEEGTSESATPESGPGTSTEPSEGSAPGSPAGSPTSTEEGTSTEPSEGSAPGTSTEPSEGSAPGTSESATPESGPGSEPATSGSETPGSEPATSGSETPGSPAGSPTSTEEGTSESATPESGPGTSTEPSEGSAPGTSTEPSEGSAPGSPAGSPTSTEEGTSTEPSEGSAPGTSTEPSEGSAPGTSESATPESGPGTSTEPSEGSAPGTSESATPESGPGSEPATSGSETPGTSTEPSEGSAPGTSTEPSEGSAPGTSESATPESGPGTSESATPESGPGSPAGSPTSTEEGTSESATPESGPGSEPATSGSETPGTSESATPESGPGTSTEPSEGSAPGTSTEPSEGSAPGTSTEPSEGSAPGTSTEPSEGSAPGTSTEPSEGSAPGTSTEPSEGSAPGSPAGSPTSTEEGTSTEPSEGSAPGTSESATPESGPGSEPATSGSETPGTSESATPESGPGSEPATSGSETPGTSESATPESGPGTSTEPSEGSAPGTSESATPESGPGSPAGSPTSTEEGSPAGSPTSTEEGSPAGSPTSTEEGTSESATPESGPGTSTEPSEGSAPGHADGSFSDEMNTILDNLAARDFINWLIETKITD

SEQ ID NO: 1658 - protein, 684 aa, Artificial Sequence
  Description of Artificial Sequence: Synthetic polypeptide
ACDTATCVTHRLAGLLSRSGGVVKNMVPTNVGSKAFGGSPAGSPTSTEEGTSESATPESGPGTSTEPSEGSAPGSPAGSPTSTEEGTSTEPSEGSAPGTSTEPSEGSAPGTSESATPESGPGSEPATSGSETPGSEPATSGSETPGSPAGSPTSTEEGTSESATPESGPGTSTEPSEGSAPGTSTEPSEGSAPGSPAGSPTSTEEGTSTEPSEGSAPGTSTEPSEGSAPGTSESATPESGPGTSTEPSEGSAPGTSESATPESGPGSEPATSGSETPGTSTEPSEGSAPGTSTEPSEGSAPGTSESATPESGPGTSESATPESGPGSPAGSPTSTEEGTSESATPESGPGSEPATSGSETPGTSESATPESGPGTSTEPSEGSAPGTSTEPSEGSAPGTSTEPSEGSAPGTSTEPSEGSAPGTSTEPSEGSAPGTSTEPSEGSAPGSPAGSPTSTEEGTSTEPSEGSAPGTSESATPESGPGSEPATSGSETPGTSESATPESGPGSEPATSGSETPGTSESATPESGPGTSTEPSEGSAPGTSESATPESGPGSPAGSPTSTEEGSPAGSPTSTEEGSPAGSPTSTEEGTSESATPESGPGTSTEPSEGSAPGGPETLCGAELVDALQFVCGDRGFYFNKPTGYGSSSRRAPQTGIVDECCFRSCDLRRLEMYCAPLKPAKSA

SEQ ID NO: 1659 - protein, 681 aa, Artificial Sequence
  Description of Artificial Sequence: Synthetic polypeptide
ACDTATCVTHRLAGLLSRSGGVVKNMVPTNVGSKAFGGSPAGSPTSTEEGTSESATPESGPGTSTEPSEGSAPGSPAGSPTSTEEGTSTEPSEGSAPGTSTEPSEGSAPGTSESATPESGPGSEPATSGSETPGSEPATSGSETPGSPAGSPTSTEEGTSESATPESGPGTSTEPSEGSAPGTSTEPSEGSAPGSPAGSPTSTEEGTSTEPSEGSAPGTSTEPSEGSAPGTSESATPESGPGTSTEPSEGSAPGTSESATPESGPGSEPATSGSETPGTSTEPSEGSAPGTSTEPSEGSAPGTSESATPESGPGTSESATPESGPGSPAGSPTSTEEGTSESATPESGPGSEPATSGSETPGTSESATPESGPGTSTEPSEGSAPGTSTEPSEGSAPGTSTEPSEGSAPGTSTEPSEGSAPGTSTEPSEGSAPGTSTEPSEGSAPGSPAGSPTSTEEGTSTEPSEGSAPGTSESATPESGPGSEPATSGSETPGTSESATPESGPGSEPATSGSETPGTSESATPESGPGTSTEPSEGSAPGTSESATPESGPGSPAGSPTSTEEGSPAGSPTSTEEGSPAGSPTSTEEGTSESATPESGPGTSTEPSEGSAPGAYRPSETLCGGELVDTLQFVCGDRGFYFSRPASRVSRRSRGIVEECCFRSCDLALLETYCATPAKSE

SEQ ID NO: 1660 - protein, 763 aa, Artificial Sequence
  Description of Artificial Sequence: Synthetic polypeptide
ACDTATCVTHRLAGLLSRSGGVVKNMVPTNVGSKAFGGSPAGSPTSTEEGTSESATPESGPGTSTEPSEGSAPGSPAGSPTSTEEGTSTEPSEGSAPGTSTEPSEGSAPGTSESATPESGPGSEPATSGSETPGSEPATSGSETPGSPAGSPTSTEEGTSESATPESGPGTSTEPSEGSAPGTSTEPSEGSAPGSPAGSPTSTEEGTSTEPSEGSAPGTSTEPSEGSAPGTSESATPESGPGTSTEPSEGSAPGTSESATPESGPGSEPATSGSETPGTSTEPSEGSAPGTSTEPSEGSAPGTSESATPESGPGTSESATPESGPGSPAGSPTSTEEGTSESATPESGPGSEPATSGSETPGTSESATPESGPGTSTEPSEGSAPGTSTEPSEGSAPGTSTEPSEGSAPGTSTEPSEGSAPGTSTEPSEGSAPGTSTEPSEGSAPGSPAGSPTSTEEGTSTEPSEGSAPGTSESATPESGPGSEPATSGSETPGTSESATPESGPGSEPATSGSETPGTSESATPESGPGTSTEPSEGSAPGTSESATPESGPGSPAGSPTSTEEGSPAGSPTSTEEGSPAGSPTSTEEGTSESATPESGPGTSTEPSEGSAPGEESQKKLPSSRITCPQGSVAYGSYCYSLILIPQTWSNAELSCQMHFSGHLAFLLSTGEITFVSSLVKNSLTAYQYIWIGLHDPSHGTLPNGSGWKWSSSNVLTFYNWERNPSIAADRGYCAVLSQKSGFQKWRDFNCENELPYICKFKV

SEQ ID NO: 1661 - protein, 661 aa, Artificial Sequence
  Description of Artificial Sequence: Synthetic polypeptide
ACDTATCVTHRLAGLLSRSGGVVKNMVPTNVGSKAFGGSPAGSPTSTEEGTSESATPESGPGTSTEPSEGSAPGSPAGSPTSTEEGTSTEPSEGSAPGTSTEPSEGSAPGTSESATPESGPGSEPATSGSETPGSEPATSGSETPGSPAGSPTSTEEGTSESATPESGPGTSTEPSEGSAPGTSTEPSEGSAPGSPAGSPTSTEEGTSTEPSEGSAPGTSTEPSEGSAPGTSESATPESGPGTSTEPSEGSAPGTSESATPESGPGSEPATSGSETPGTSTEPSEGSAPGTSTEPSEGSAPGTSESATPESGPGTSESATPESGPGSPAGSPTSTEEGTSESATPESGPGSEPATSGSETPGTSESATPESGPGTSTEPSEGSAPGTSTEPSEGSAPGTSTEPSEGSAPGTSTEPSEGSAPGTSTEPSEGSAPGTSTEPSEGSAPGSPAGSPTSTEEGTSTEPSEGSAPGTSESATPESGPGSEPATSGSETPGTSESATPESGPGSEPATSGSETPGTSESATPESGPGTSTEPSEGSAPGTSESATPESGPGSPAGSPTSTEEGSPAGSPTSTEEGSPAGSPTSTEEGTSESATPESGPGTSTEPSEGSAPGTQAQLLRVGCVLGTCQVQNLSHRLWQLMGPAGRQDSAPVDPSSPHSY

SEQ ID NO: 1662 - protein, 760 aa, Artificial Sequence
  Description of Artificial Sequence: Synthetic polypeptide
ACDTATCVTHRLAGLLSRSGGVVKNMVPTNVGSKAFGGSPAGSPTSTEEGTSESATPESGPGTSTEPSEGSAPGSPAGSPTSTEEGTSTEPSEGSAPGTSTEPSEGSAPGTSESATPESGPGSEPATSGSETPGSEPATSGSETPGSPAGSPTSTEEGTSESATPESGPGTSTEPSEGSAPGTSTEPSEGSAPGSPAGSPTSTEEGTSTEPSEGSAPGTSTEPSEGSAPGTSESATPESGPGTSTEPSEGSAPGTSESATPESGPGSEPATSGSETPGTSTEPSEGSAPGTSTEPSEGSAPGTSESATPESGPGTSESATPESGPGSPAGSPTSTEEGTSESATPESGPGSEPATSGSETPGTSESATPESGPGTSTEPSEGSAPGTSTEPSEGSAPGTSTEPSEGSAPGTSTEPSEGSAPGTSTEPSEGSAPGTSTEPSEGSAPGSPAGSPTSTEEGTSTEPSEGSAPGTSESATPESGPGSEPATSGSETPGTSESATPESGPGSEPATSGSETPGTSESATPESGPGTSTEPSEGSAPGTSESATPESGPGSPAGSPTSTEEGSPAGSPTSTEEGSPAGSPTSTEEGTSESATPESGPGTSTEPSEGSAPGVPIQKVQDDTKTLIKTIVTRINDISHTQSVSSKQKVTGLDFIPGLHPILTLSKMDQTLAVYQQILTSMPSRNVIQISNDLENLRDLLHVLAFSKSCHLPWASGLETLDSLGGVLEASGYSTEVVALSRLQGSLQDMLWQLDLSPGC

SEQ ID NO: 1663 - protein, 639 aa, Artificial Sequence
  Description of Artificial Sequence: Synthetic polypeptide
ACDTATCVTHRLAGLLSRSGGVVKNMVPTNVGSKAFGGSPAGSPTSTEEGTSESATPESGPGTSTEPSEGSAPGSPAGSPTSTEEGTSTEPSEGSAPGTSTEPSEGSAPGTSESATPESGPGSEPATSGSETPGSEPATSGSETPGSPAGSPTSTEEGTSESATPESGPGTSTEPSEGSAPGTSTEPSEGSAPGSPAGSPTSTEEGTSTEPSEGSAPGTSTEPSEGSAPGTSESATPESGPGTSTEPSEGSAPGTSESATPESGPGSEPATSGSETPGTSTEPSEGSAPGTSTEPSEGSAPGTSESATPESGPGTSESATPESGPGSPAGSPTSTEEGTSESATPESGPGSEPATSGSETPGTSESATPESGPGTSTEPSEGSAPGTSTEPSEGSAPGTSTEPSEGSAPGTSTEPSEGSAPGTSTEPSEGSAPGTSTEPSEGSAPGSPAGSPTSTEEGTSTEPSEGSAPGTSESATPESGPGSEPATSGSETPGTSESATPESGPGSEPATSGSETPGTSESATPESGPGTSTEPSEGSAPGTSESATPESGPGSPAGSPTSTEEGSPAGSPTSTEEGSPAGSPTSTEEGTSESATPESGPGTSTEPSEGSAPGFRVDEEFQSPFASQSRGYFLFRPRN

SEQ ID NO: 1664 - protein, 651 aa, Artificial Sequence
  Description of Artificial Sequence: Synthetic polypeptide
ACDTATCVTHRLAGLLSRSGGVVKNMVPTNVGSKAFGGSPAGSPTSTEEGTSESATPESGPGTSTEPSEGSAPGSPAGSPTSTEEGTSTEPSEGSAPGTSTEPSEGSAPGTSESATPESGPGSEPATSGSETPGSEPATSGSETPGSPAGSPTSTEEGTSESATPESGPGTSTEPSEGSAPGTSTEPSEGSAPGSPAGSPTSTEEGTSTEPSEGSAPGTSTEPSEGSAPGTSESATPESGPGTSTEPSEGSAPGTSESATPESGPGSEPATSGSETPGTSTEPSEGSAPGTSTEPSEGSAPGTSESATPESGPGTSESATPESGPGSPAGSPTSTEEGTSESATPESGPGSEPATSGSETPGTSESATPESGPGTSTEPSEGSAPGTSTEPSEGSAPGTSTEPSEGSAPGTSTEPSEGSAPGTSTEPSEGSAPGTSTEPSEGSAPGSPAGSPTSTEEGTSTEPSEGSAPGTSESATPESGPGSEPATSGSETPGTSESATPESGPGSEPATSGSETPGTSESATPESGPGTSTEPSEGSAPGTSESATPESGPGSPAGSPTSTEEGSPAGSPTSTEEGSPAGSPTSTEEGTSESATPESGPGTSTEPSEGSAPGHSQGTFTSDYSKYLDSRRAQDFVQWLMNTKRNRNNIA

SEQ ID NO: 1665 - protein, 651 aa, Artificial Sequence
  Description of Artificial Sequence: Synthetic polypeptide
ACDTATCVTHRLAGLLSRSGGVVKNMVPTNVGSKAFGGSPAGSPTSTEEGTSESATPESGPGTSTEPSEGSAPGSPAGSPTSTEEGTSTEPSEGSAPGTSTEPSEGSAPGTSESATPESGPGSEPATSGSETPGSEPATSGSETPGSPAGSPTSTEEGTSESATPESGPGTSTEPSEGSAPGTSTEPSEGSAPGSPAGSPTSTEEGTSTEPSEGSAPGTSTEPSEGSAPGTSESATPESGPGTSTEPSEGSAPGTSESATPESGPGSEPATSGSETPGTSTEPSEGSAPGTSTEPSEGSAPGTSESATPESGPGTSESATPESGPGSPAGSPTSTEEGTSESATPESGPGSEPATSGSETPGTSESATPESGPGTSTEPSEGSAPGTSTEPSEGSAPGTSTEPSEGSAPGTSTEPSEGSAPGTSTEPSEGSAPGTSTEPSEGSAPGSPAGSPTSTEEGTSTEPSEGSAPGTSESATPESGPGSEPATSGSETPGTSESATPESGPGSEPATSGSETPGTSESATPESGPGTSTEPSEGSAPGTSESATPESGPGSPAGSPTSTEEGSPAGSPTSTEEGSPAGSPTSTEEGTSESATPESGPGTSTEPSEGSAPGKCNTATCATNRLANFLVHSSNNFGPILPPTNVGSNTY

SEQ ID NO: 1666 - protein, 650 aa, Artificial Sequence
  Description of Artificial Sequence: Synthetic polypeptide
ACDTATCVTHRLAGLLSRSGGVVKNMVPTNVGSKAFGGSPAGSPTSTEEGTSESATPESGPGTSTEPSEGSAPGSPAGSPTSTEEGTSTEPSEGSAPGTSTEPSEGSAPGTSESATPESGPGSEPATSGSETPGSEPATSGSETPGSPAGSPTSTEEGTSESATPESGPGTSTEPSEGSAPGTSTEPSEGSAPGSPAGSPTSTEEGTSTEPSEGSAPGTSTEPSEGSAPGTSESATPESGPGTSTEPSEGSAPGTSESATPESGPGSEPATSGSETPGTSTEPSEGSAPGTSTEPSEGSAPGTSESATPESGPGTSESATPESGPGSPAGSPTSTEEGTSESATPESGPGSEPATSGSETPGTSESATPESGPGTSTEPSEGSAPGTSTEPSEGSAPGTSTEPSEGSAPGTSTEPSEGSAPGTSTEPSEGSAPGTSTEPSEGSAPGSPAGSPTSTEEGTSTEPSEGSAPGTSESATPESGPGSEPATSGSETPGTSESATPESGPGSEPATSGSETPGTSESATPESGPGTSTEPSEGSAPGTSESATPESGPGSPAGSPTSTEEGSPAGSPTSTEEGSPAGSPTSTEEGTSESATPESGPGTSTEPSEGSAPGYPIKPEAPGEDASPEELNRYYASLRHYLNLVTRQRY

SEQ ID NO: 1667 - protein, 655 aa, Artificial Sequence
  Description of Artificial Sequence: Synthetic polypeptide
ACDTATCVTHRLAGLLSRSGGVVKNMVPTNVGSKAFGGSPAGSPTSTEEGTSESATPESGPGTSTEPSEGSAPGSPAGSPTSTEEGTSTEPSEGSAPGTSTEPSEGSAPGTSESATPESGPGSEPATSGSETPGSEPATSGSETPGSPAGSPTSTEEGTSESATPESGPGTSTEPSEGSAPGTSTEPSEGSAPGSPAGSPTSTEEGTSTEPSEGSAPGTSTEPSEGSAPGTSESATPESGPGTSTEPSEGSAPGTSESATPESGPGSEPATSGSETPGTSTEPSEGSAPGTSTEPSEGSAPGTSESATPESGPGTSESATPESGPGSPAGSPTSTEEGTSESATPESGPGSEPATSGSETPGTSESATPESGPGTSTEPSEGSAPGTSTEPSEGSAPGTSTEPSEGSAPGTSTEPSEGSAPGTSTEPSEGSAPGTSTEPSEGSAPGSPAGSPTSTEEGTSTEPSEGSAPGTSESATPESGPGSEPATSGSETPGTSESATPESGPGSEPATSGSETPGTSESATPESGPGTSTEPSEGSAPGTSESATPESGPGSPAGSPTSTEEGSPAGSPTSTEEGSPAGSPTSTEEGTSESATPESGPGTSTEPSEGSAPGIVLSLDVPIGLLQILLEQARARAAREQATTNARILARVGHC

SEQ ID NO: 1668 - protein, 652 aa, Artificial Sequence
  Description of Artificial Sequence: Synthetic polypeptide
ACDTATCVTHRLAGLLSRSGGVVKNMVPTNVGSKAFGGSPAGSPTSTEEGTSESATPESGPGTSTEPSEGSAPGSPAGSPTSTEEGTSTEPSEGSAPGTSTEPSEGSAPGTSESATPESGPGSEPATSGSETPGSEPATSGSETPGSPAGSPTSTEEGTSESATPESGPGTSTEPSEGSAPGTSTEPSEGSAPGSPAGSPTSTEEGTSTEPSEGSAPGTSTEPSEGSAPGTSESATPESGPGTSTEPSEGSAPGTSESATPESGPGSEPATSGSETPGTSTEPSEGSAPGTSTEPSEGSAPGTSESATPESGPGTSESATPESGPGSPAGSPTSTEEGTSESATPESGPGSEPATSGSETPGTSESATPESGPGTSTEPSEGSAPGTSTEPSEGSAPGTSTEPSEGSAPGTSTEPSEGSAPGTSTEPSEGSAPGTSTEPSEGSAPGSPAGSPTSTEEGTSTEPSEGSAPGTSESATPESGPGSEPATSGSETPGTSESATPESGPGSEPATSGSETPGTSESATPESGPGTSTEPSEGSAPGTSESATPESGPGSPAGSPTSTEEGSPAGSPTSTEEGSPAGSPTSTEEGTSESATPESGPGTSTEPSEGSAPGFTLSLDVPTNIMNLLFNIAKAKNLRAQAAANAHLMAQI

SEQ ID NO: 1669 - protein, 647 aa, Artificial Sequence
  Description of Artificial Sequence: Synthetic polypeptide
KAPSGRMSIVKNLQNLDPSHRISDRDYMGWMDFGGSPAGSPTSTEEGTSESATPESGPGTSTEPSEGSAPGSPAGSPTSTEEGTSTEPSEGSAPGTSTEPSEGSAPGTSESATPESGPGSEPATSGSETPGSEPATSGSETPGSPAGSPTSTEEGTSESATPESGPGTSTEPSEGSAPGTSTEPSEGSAPGSPAGSPTSTEEGTSTEPSEGSAPGTSTEPSEGSAPGTSESATPESGPGTSTEPSEGSAPGTSESATPESGPGSEPATSGSETPGTSTEPSEGSAPGTSTEPSEGSAPGTSESATPESGPGTSESATPESGPGSPAGSPTSTEEGTSESATPESGPGSEPATSGSETPGTSESATPESGPGTSTEPSEGSAPGTSTEPSEGSAPGTSTEPSEGSAPGTSTEPSEGSAPGTSTEPSEGSAPGTSTEPSEGSAPGSPAGSPTSTEEGTSTEPSEGSAPGTSESATPESGPGSEPATSGSETPGTSESATPESGPGSEPATSGSETPGTSESATPESGPGTSTEPSEGSAPGTSESATPESGPGSPAGSPTSTEEGSPAGSPTSTEEGSPAGSPTSTEEGTSESATPESGPGTSTEPSEGSAPGACDTATCVTHRLAGLLSRSGGVVKNMVPTNVGSKAF

SEQ ID NO: 1670 - protein, 622 aa, Artificial Sequence
  Description of Artificial Sequence: Synthetic polypeptide
DYMGWMDFGGSPAGSPTSTEEGTSESATPESGPGTSTEPSEGSAPGSPAGSPTSTEEGTSTEPSEGSAPGTSTEPSEGSAPGTSESATPESGPGSEPATSGSETPGSEPATSGSETPGSPAGSPTSTEEGTSESATPESGPGTSTEPSEGSAPGTSTEPSEGSAPGSPAGSPTSTEEGTSTEPSEGSAPGTSTEPSEGSAPGTSESATPESGPGTSTEPSEGSAPGTSESATPESGPGSEPATSGSETPGTSTEPSEGSAPGTSTEPSEGSAPGTSESATPESGPGTSESATPESGPGSPAGSPTSTEEGTSESATPESGPGSEPATSGSETPGTSESATPESGPGTSTEPSEGSAPGTSTEPSEGSAPGTSTEPSEGSAPGTSTEPSEGSAPGTSTEPSEGSAPGTSTEPSEGSAPGSPAGSPTSTEEGTSTEPSEGSAPGTSESATPESGPGSEPATSGSETPGTSESATPESGPGSEPATSGSETPGTSESATPESGPGTSTEPSEGSAPGTSESATPESGPGSPAGSPTSTEEGSPAGSPTSTEEGSPAGSPTSTEEGTSESATPESGPGTSTEPSEGSAPGACDTATCVTHRLAGLLSRSGGVVKNMVPTNVGSKAF

SEQ ID NO: 1671 - protein, 653 aa, Artificial Sequence
  Description of Artificial Sequence: Synthetic polypeptide
HSDGTFTSDLSKQMEEEAVRLFIEWLKNGGPSSGAPPPSGGSPAGSPTSTEEGTSESATPESGPGTSTEPSEGSAPGSPAGSPTSTEEGTSTEPSEGSAPGTSTEPSEGSAPGTSESATPESGPGSEPATSGSETPGSEPATSGSETPGSPAGSPTSTEEGTSESATPESGPGTSTEPSEGSAPGTSTEPSEGSAPGSPAGSPTSTEEGTSTEPSEGSAPGTSTEPSEGSAPGTSESATPESGPGTSTEPSEGSAPGTSESATPESGPGSEPATSGSETPGTSTEPSEGSAPGTSTEPSEGSAPGTSESATPESGPGTSESATPESGPGSPAGSPTSTEEGTSESATPESGPGSEPATSGSETPGTSESATPESGPGTSTEPSEGSAPGTSTEPSEGSAPGTSTEPSEGSAPGTSTEPSEGSAPGTSTEPSEGSAPGTSTEPSEGSAPGSPAGSPTSTEEGTSTEPSEGSAPGTSESATPESGPGSEPATSGSETPGTSESATPESGPGSEPATSGSETPGTSESATPESGPGTSTEPSEGSAPGTSESATPESGPGSPAGSPTSTEEGSPAGSPTSTEEGSPAGSPTSTEEGTSESATPESGPGTSTEPSEGSAPGACDTATCVTHRLAGLLSRSGGVVKNMVPTNVGSKAF

SEQ ID NO: 1672 - protein, 653 aa, Artificial Sequence
  Description of Artificial Sequence: Synthetic polypeptide
HGEGTFTSDLSKQMEEEAVRLFIEWLKNGGPSSGAPPPSGGSPAGSPTSTEEGTSESATPESGPGTSTEPSEGSAPGSPAGSPTSTEEGTSTEPSEGSAPGTSTEPSEGSAPGTSESATPESGPGSEPATSGSETPGSEPATSGSETPGSPAGSPTSTEEGTSESATPESGPGTSTEPSEGSAPGTSTEPSEGSAPGSPAGSPTSTEEGTSTEPSEGSAPGTSTEPSEGSAPGTSESATPESGPGTSTEPSEGSAPGTSESATPESGPGSEPATSGSETPGTSTEPSEGSAPGTSTEPSEGSAPGTSESATPESGPGTSESATPESGPGSPAGSPTSTEEGTSESATPESGPGSEPATSGSETPGTSESATPESGPGTSTEPSEGSAPGTSTEPSEGSAPGTSTEPSEGSAPGTSTEPSEGSAPGTSTEPSEGSAPGTSTEPSEGSAPGSPAGSPTSTEEGTSTEPSEGSAPGTSESATPESGPGSEPATSGSETPGTSESATPESGPGSEPATSGSETPGTSESATPESGPGTSTEPSEGSAPGTSESATPESGPGSPAGSPTSTEEGSPAGSPTSTEEGSPAGSPTSTEEGTSESATPESGPGTSTEPSEGSAPGACDTATCVTHRLAGLLSRSGGVVKNMVPTNVGSKAF

SEQ ID NO: 1673 - protein, 830 aa, Artificial Sequence
  Description of Artificial Sequence: Synthetic polypeptide
MRSGCVVVHVWILAGLWLAVAGRPLAFSDAGPHVHYGWGDPIRLRHLYTSGPHGLSSCFLRIRADGVVDCARGQSAHSLLEIKAVALRTVAIKGVHSVRYLCMGADGKMQGLLQYSEEDCAFEEEIRPDGYNVYRSEKHRLPVSLSSAKQRQLYKNRGFLPLSHFLPMLPMVPEEPEDLRGHLESDMFSSPLETDSMDPFGLVTGLEAVRSPSFEKGGSPAGSPTSTEEGTSESATPESGPGTSTEPSEGSAPGSPAGSPTSTEEGTSTEPSEGSAPGTSTEPSEGSAPGTSESATPESGPGSEPATSGSETPGSEPATSGSETPGSPAGSPTSTEEGTSESATPESGPGTSTEPSEGSAPGTSTEPSEGSAPGSPAGSPTSTEEGTSTEPSEGSAPGTSTEPSEGSAPGTSESATPESGPGTSTEPSEGSAPGTSESATPESGPGSEPATSGSETPGTSTEPSEGSAPGTSTEPSEGSAPGTSESATPESGPGTSESATPESGPGSPAGSPTSTEEGTSESATPESGPGSEPATSGSETPGTSESATPESGPGTSTEPSEGSAPGTSTEPSEGSAPGTSTEPSEGSAPGTSTEPSEGSAPGTSTEPSEGSAPGTSTEPSEGSAPGSPAGSPTSTEEGTSTEPSEGSAPGTSESATPESGPGSEPATSGSETPGTSESATPESGPGSEPATSGSETPGTSESATPESGPGTSTEPSEGSAPGTSESATPESGPGSPAGSPTSTEEGSPAGSPTSTEEGSPAGSPTSTEEGTSESATPESGPGTSTEPSEGSAPGACDTATCVTHRLAGLLSRSGGVVKNMVPTNVGSKAF

SEQ ID NO: 1674 - protein, 823 aa, Artificial Sequence
  Description of Artificial Sequence: Synthetic polypeptide
MDSDETGFEHSGLWVSVLAGLLLGACQAHPIPDSSPLLQFGGQVRQRYLYTDDAQQTEAHLEIREDGTVGGAADQSPESLLQLKALKPGVIQILGVKTSRFLCQRPDGALYGSLHFDPEACSFRELLLEDGYNVYQSEAHGLPLHLPGNKSPHRDPAPRGPARFLPLPGLPPALPEPPGILAPQPPDVGSSDPLSMVGPSQGRSPSYASGGSPAGSPTSTEEGTSESATPESGPGTSTEPSEGSAPGSPAGSPTSTEEGTSTEPSEGSAPGTSTEPSEGSAPGTSESATPESGPGSEPATSGSETPGSEPATSGSETPGSPAGSPTSTEEGTSESATPESGPGTSTEPSEGSAPGTSTEPSEGSAPGSPAGSPTSTEEGTSTEPSEGSAPGTSTEPSEGSAPGTSESATPESGPGTSTEPSEGSAPGTSESATPESGPGSEPATSGSETPGTSTEPSEGSAPGTSTEPSEGSAPGTSESATPESGPGTSESATPESGPGSPAGSPTSTEEGTSESATPESGPGSEPATSGSETPGTSESATPESGPGTSTEPSEGSAPGTSTEPSEGSAPGTSTEPSEGSAPGTSTEPSEGSAPGTSTEPSEGSAPGTSTEPSEGSAPGSPAGSPTSTEEGTSTEPSEGSAPGTSESATPESGPGSEPATSGSETPGTSESATPESGPGSEPATSGSETPGTSESATPESGPGTSTEPSEGSAPGTSESATPESGPGSPAGSPTSTEEGSPAGSPTSTEEGSPAGSPTSTEEGTSESATPESGPGTSTEPSEGSAPGACDTATCVTHRLAGLLSRSGGVVKNMVPTNVGSKAF

SEQ ID NO: 1675 - protein, 648 aa, Artificial Sequence
  Description of Artificial Sequence: Synthetic polypeptide
QLGPQGPPHLVADPSKKQGPWLEEEEEAYGWMDFGGSPAGSPTSTEEGTSESATPESGPGTSTEPSEGSAPGSPAGSPTSTEEGTSTEPSEGSAPGTSTEPSEGSAPGTSESATPESGPGSEPATSGSETPGSEPATSGSETPGSPAGSPTSTEEGTSESATPESGPGTSTEPSEGSAPGTSTEPSEGSAPGSPAGSPTSTEEGTSTEPSEGSAPGTSTEPSEGSAPGTSESATPESGPGTSTEPSEGSAPGTSESATPESGPGSEPATSGSETPGTSTEPSEGSAPGTSTEPSEGSAPGTSESATPESGPGTSESATPESGPGSPAGSPTSTEEGTSESATPESGPGSEPATSGSETPGTSESATPESGPGTSTEPSEGSAPGTSTEPSEGSAPGTSTEPSEGSAPGTSTEPSEGSAPGTSTEPSEGSAPGTSTEPSEGSAPGSPAGSPTSTEEGTSTEPSEGSAPGTSESATPESGPGSEPATSGSETPGTSESATPESGPGSEPATSGSETPGTSESATPESGPGTSTEPSEGSAPGTSESATPESGPGSPAGSPTSTEEGSPAGSPTSTEEGSPAGSPTSTEEGTSESATPESGPGTSTEPSEGSAPGACDTATCVTHRLAGLLSRSGGVVKNMVPTNVGSKAF

SEQ ID NO: 1676 - protein, 636 aa, Artificial Sequence
  Description of Artificial Sequence: Synthetic polypeptide
DPSKKQGPWLEEEEEAYGWMDFGGSPAGSPTSTEEGTSESATPESGPGTSTEPSEGSAPGSPAGSPTSTEEGTSTEPSEGSAPGTSTEPSEGSAPGTSESATPESGPGSEPATSGSETPGSEPATSGSETPGSPAGSPTSTEEGTSESATPESGPGTSTEPSEGSAPGTSTEPSEGSAPGSPAGSPTSTEEGTSTEPSEGSAPGTSTEPSEGSAPGTSESATPESGPGTSTEPSEGSAPGTSESATPESGPGSEPATSGSETPGTSTEPSEGSAPGTSTEPSEGSAPGTSESATPESGPGTSESATPESGPGSPAGSPTSTEEGTSESATPESGPGSEPATSGSETPGTSESATPESGPGTSTEPSEGSAPGTSTEPSEGSAPGTSTEPSEGSAPGTSTEPSEGSAPGTSTEPSEGSAPGTSTEPSEGSAPGSPAGSPTSTEEGTSTEPSEGSAPGTSESATPESGPGSEPATSGSETPGTSESATPESGPGSEPATSGSETPGTSESATPESGPGTSTEPSEGSAPGTSESATPESGPGSPAGSPTSTEEGSPAGSPTSTEEGSPAGSPTSTEEGTSESATPESGPGTSTEPSEGSAPGACDTATCVTHRLAGLLSRSGGVVKNMVPTNVGSKAF

SEQ ID NO: 1677 - protein, 656 aa, Artificial Sequence
  Description of Artificial Sequence: Synthetic polypeptide
YAEGTFISDYSIAMDKIHQQDFVNWLLAQKGKKNDWKHNITQGGSPAGSPTSTEEGTSESATPESGPGTSTEPSEGSAPGSPAGSPTSTEEGTSTEPSEGSAPGTSTEPSEGSAPGTSESATPESGPGSEPATSGSETPGSEPATSGSETPGSPAGSPTSTEEGTSESATPESGPGTSTEPSEGSAPGTSTEPSEGSAPGSPAGSPTSTEEGTSTEPSEGSAPGTSTEPSEGSAPGTSESATPESGPGTSTEPSEGSAPGTSESATPESGPGSEPATSGSETPGTSTEPSEGSAPGTSTEPSEGSAPGTSESATPESGPGTSESATPESGPGSPAGSPTSTEEGTSESATPESGPGSEPATSGSETPGTSESATPESGPGTSTEPSEGSAPGTSTEPSEGSAPGTSTEPSEGSAPGTSTEPSEGSAPGTSTEPSEGSAPGTSTEPSEGSAPGSPAGSPTSTEEGTSTEPSEGSAPGTSESATPESGPGSEPATSGSETPGTSESATPESGPGSEPATSGSETPGTSESATPESGPGTSTEPSEGSAPGTSESATPESGPGSPAGSPTSTEEGSPAGSPTSTEEGSPAGSPTSTEEGTSESATPESGPGTSTEPSEGSAPGACDTATCVTHRLAGLLSRSGGVVKNMVPTNVGSKAF

SEQ ID NO: 1678 - protein, 643 aa, Artificial Sequence
  Description of Artificial Sequence: Synthetic polypeptide
HSQGTFTSDYSKYLDSRRAQDFVQWLMNTGGSPAGSPTSTEEGTSESATPESGPGTSTEPSEGSAPGSPAGSPTSTEEGTSTEPSEGSAPGTSTEPSEGSAPGTSESATPESGPGSEPATSGSETPGSEPATSGSETPGSPAGSPTSTEEGTSESATPESGPGTSTEPSEGSAPGTSTEPSEGSAPGSPAGSPTSTEEGTSTEPSEGSAPGTSTEPSEGSAPGTSESATPESGPGTSTEPSEGSAPGTSESATPESGPGSEPATSGSETPGTSTEPSEGSAPGTSTEPSEGSAPGTSESATPESGPGTSESATPESGPGSPAGSPTSTEEGTSESATPESGPGSEPATSGSETPGTSESATPESGPGTSTEPSEGSAPGTSTEPSEGSAPGTSTEPSEGSAPGTSTEPSEGSAPGTSTEPSEGSAPGTSTEPSEGSAPGSPAGSPTSTEEGTSTEPSEGSAPGTSESATPESGPGSEPATSGSETPGTSESATPESGPGSEPATSGSETPGTSESATPESGPGTSTEPSEGSAPGTSESATPESGPGSPAGSPTSTEEGSPAGSPTSTEEGSPAGSPTSTEEGTSESATPESGPGTSTEPSEGSAPGACDTATCVTHRLAGLLSRSGGVVKNMVPTNVGSKAF

SEQ ID NO: 1679 - protein, 651 aa, Artificial Sequence
  Description of Artificial Sequence: Synthetic polypeptide
HDEFERHAEGTFTSDVSSTLEGQAALEFIAWLVKGRGGGSPAGSPTSTEEGTSESATPESGPGTSTEPSEGSAPGSPAGSPTSTEEGTSTEPSEGSAPGTSTEPSEGSAPGTSESATPESGPGSEPATSGSETPGSEPATSGSETPGSPAGSPTSTEEGTSESATPESGPGTSTEPSEGSAPGTSTEPSEGSAPGSPAGSPTSTEEGTSTEPSEGSAPGTSTEPSEGSAPGTSESATPESGPGTSTEPSEGSAPGTSESATPESGPGSEPATSGSETPGTSTEPSEGSAPGTSTEPSEGSAPGTSESATPESGPGTSESATPESGPGSPAGSPTSTEEGTSESATPESGPGSEPATSGSETPGTSESATPESGPGTSTEPSEGSAPGTSTEPSEGSAPGTSTEPSEGSAPGTSTEPSEGSAPGTSTEPSEGSAPGTSTEPSEGSAPGSPAGSPTSTEEGTSTEPSEGSAPGTSESATPESGPGSEPATSGSETPGTSESATPESGPGSEPATSGSETPGTSESATPESGPGTSTEPSEGSAPGTSESATPESGPGSPAGSPTSTEEGSPAGSPTSTEEGSPAGSPTSTEEGTSESATPESGPGTSTEPSEGSAPGACDTATCVTHRLAGLLSRSGGVVKNMVPTNVGSKAF

SEQ ID NO: 1680 - protein, 644 aa, Artificial Sequence
  Description of Artificial Sequence: Synthetic polypeptide
HAEGTFTSDVSSYLEGQAALEFIAWLVKGRGGSPAGSPTSTEEGTSESATPESGPGTSTEPSEGSAPGSPAGSPTSTEEGTSTEPSEGSAPGTSTEPSEGSAPGTSESATPESGPGSEPATSGSETPGSEPATSGSETPGSPAGSPTSTEEGTSESATPESGPGTSTEPSEGSAPGTSTEPSEGSAPGSPAGSPTSTEEGTSTEPSEGSAPGTSTEPSEGSAPGTSESATPESGPGTSTEPSEGSAPGTSESATPESGPGSEPATSGSETPGTSTEPSEGSAPGTSTEPSEGSAPGTSESATPESGPGTSESATPESGPGSPAGSPTSTEEGTSESATPESGPGSEPATSGSETPGTSESATPESGPGTSTEPSEGSAPGTSTEPSEGSAPGTSTEPSEGSAPGTSTEPSEGSAPGTSTEPSEGSAPGTSTEPSEGSAPGSPAGSPTSTEEGTSTEPSEGSAPGTSESATPESGPGSEPATSGSETPGTSESATPESGPGSEPATSGSETPGTSESATPESGPGTSTEPSEGSAPGTSESATPESGPGSPAGSPTSTEEGSPAGSPTSTEEGSPAGSPTSTEEGTSESATPESGPGTSTEPSEGSAPGACDTATCVTHRLAGLLSRSGGVVKNMVPTNVGSKAF

SEQ ID NO: 1681 - protein, 647 aa, Artificial Sequence
  Description of Artificial Sequence: Synthetic polypeptide
HADGSFSDEMNTILDNLAARDFINWLIETKITDGGSPAGSPTSTEEGTSESATPESGPGTSTEPSEGSAPGSPAGSPTSTEEGTSTEPSEGSAPGTSTEPSEGSAPGTSESATPESGPGSEPATSGSETPGSEPATSGSETPGSPAGSPTSTEEGTSESATPESGPGTSTEPSEGSAPGTSTEPSEGSAPGSPAGSPTSTEEGTSTEPSEGSAPGTSTEPSEGSAPGTSESATPESGPGTSTEPSEGSAPGTSESATPESGPGSEPATSGSETPGTSTEPSEGSAPGTSTEPSEGSAPGTSESATPESGPGTSESATPESGPGSPAGSPTSTEEGTSESATPESGPGSEPATSGSETPGTSESATPESGPGTSTEPSEGSAPGTSTEPSEGSAPGTSTEPSEGSAPGTSTEPSEGSAPGTSTEPSEGSAPGTSTEPSEGSAPGSPAGSPTSTEEGTSTEPSEGSAPGTSESATPESGPGSEPATSGSETPGTSESATPESGPGSEPATSGSETPGTSESATPESGPGTSTEPSEGSAPGTSESATPESGPGSPAGSPTSTEEGSPAGSPTSTEEGSPAGSPTSTEEGTSESATPESGPGTSTEPSEGSAPGACDTATCVTHRLAGLLSRSGGVVKNMVPTNVGSKAF

SEQ ID NO: 1682 - protein, 684 aa, Artificial Sequence
  Description of Artificial Sequence: Synthetic polypeptide
GPETLCGAELVDALQFVCGDRGFYFNKPTGYGSSSRRAPQTGIVDECCFRSCDLRRLEMYCAPLKPAKSAGGSPAGSPTSTEEGTSESATPESGPGTSTEPSEGSAPGSPAGSPTSTEEGTSTEPSEGSAPGTSTEPSEGSAPGTSESATPESGPGSEPATSGSETPGSEPATSGSETPGSPAGSPTSTEEGTSESATPESGPGTSTEPSEGSAPGTSTEPSEGSAPGSPAGSPTSTEEGTSTEPSEGSAPGTSTEPSEGSAPGTSESATPESGPGTSTEPSEGSAPGTSESATPESGPGSEPATSGSETPGTSTEPSEGSAPGTSTEPSEGSAPGTSESATPESGPGTSESATPESGPGSPAGSPTSTEEGTSESATPESGPGSEPATSGSETPGTSESATPESGPGTSTEPSEGSAPGTSTEPSEGSAPGTSTEPSEGSAPGTSTEPSEGSAPGTSTEPSEGSAPGTSTEPSEGSAPGSPAGSPTSTEEGTSTEPSEGSAPGTSESATPESGPGSEPATSGSETPGTSESATPESGPGSEPATSGSETPGTSESATPESGPGTSTEPSEGSAPGTSESATPESGPGSPAGSPTSTEEGSPAGSPTSTEEGSPAGSPTSTEEGTSESATPESGPGTSTEPSEGSAPGACDTATCVTHRLAGLLSRSGGVVKNMVPTNVGSKAF

SEQ ID NO: 1683 - protein, 681 aa, Artificial Sequence
  Description of Artificial Sequence: Synthetic polypeptide
AYRPSETLCGGELVDTLQFVCGDRGFYFSRPASRVSRRSRGIVEECCFRSCDLALLETYCATPAKSEGGSPAGSPTSTEEGTSESATPESGPGTSTEPSEGSAPGSPAGSPTSTEEGTSTEPSEGSAPGTSTEPSEGSAPGTSESATPESGPGSEPATSGSETPGSEPATSGSETPGSPAGSPTSTEEGTSESATPESGPGTSTEPSEGSAPGTSTEPSEGSAPGSPAGSPTSTEEGTSTEPSEGSAPGTSTEPSEGSAPGTSESATPESGPGTSTEPSEGSAPGTSESATPESGPGSEPATSGSETPGTSTEPSEGSAPGTSTEPSEGSAPGTSESATPESGPGTSESATPESGPGSPAGSPTSTEEGTSESATPESGPGSEPATSGSETPGTSESATPESGPGTSTEPSEGSAPGTSTEPSEGSAPGTSTEPSEGSAPGTSTEPSEGSAPGTSTEPSEGSAPGTSTEPSEGSAPGSPAGSPTSTEEGTSTEPSEGSAPGTSESATPESGPGSEPATSGSETPGTSESATPESGPGSEPATSGSETPGTSESATPESGPGTSTEPSEGSAPGTSESATPESGPGSPAGSPTSTEEGSPAGSPTSTEEGSPAGSPTSTEEGTSESATPESGPGTSTEPSEGSAPGACDTATCVTHRLAGLLSRSGGVVKNMVPTNVGSKAF

SEQ ID NO: 1684 - protein, 763 aa, Artificial Sequence
  Description of Artificial Sequence: Synthetic polypeptide
EESQKKLPSSRITCPQGSVAYGSYCYSLILIPQTWSNAELSCQMHFSGHLAFLLSTGEITFVSSLVKNSLTAYQYIWIGLHDPSHGTLPNGSGWKWSSSNVLTFYNWERNPSIAADRGYCAVLSQKSGFQKWRDFNCENELPYICKFKVGGSPAGSPTSTEEGTSESATPESGPGTSTEPSEGSAPGSPAGSPTSTEEGTSTEPSEGSAPGTSTEPSEGSAPGTSESATPESGPGSEPATSGSETPGSEPATSGSETPGSPAGSPTSTEEGTSESATPESGPGTSTEPSEGSAPGTSTEPSEGSAPGSPAGSPTSTEEGTSTEPSEGSAPGTSTEPSEGSAPGTSESATPESGPGTSTEPSEGSAPGTSESATPESGPGSEPATSGSETPGTSTEPSEGSAPGTSTEPSEGSAPGTSESATPESGPGTSESATPESGPGSPAGSPTSTEEGTSESATPESGPGSEPATSGSETPGTSESATPESGPGTSTEPSEGSAPGTSTEPSEGSAPGTSTEPSEGSAPGTSTEPSEGSAPGTSTEPSEGSAPGTSTEPSEGSAPGSPAGSPTSTEEGTSTEPSEGSAPGTSESATPESGPGSEPATSGSETPGTSESATPESGPGSEPATSGSETPGTSESATPESGPGTSTEPSEGSAPGTSESATPESGPGSPAGSPTSTEEGSPAGSPTSTEEGSPAGSPTSTEEGTSESATPESGPGTSTEPSEGSAPGACDTATCVTHRLAGLLSRSGGVVKNMVPTNVGSKAF

SEQ ID NO: 1685 - protein, 661 aa, Artificial Sequence
  Description of Artificial Sequence: Synthetic polypeptide
TQAQLLRVGCVLGTCQVQNLSHRLWQLMGPAGRQDSAPVDPSSPHSYGGSPAGSPTSTEEGTSESATPESGPGTSTEPSEGSAPGSPAGSPTSTEEGTSTEPSEGSAPGTSTEPSEGSAPGTSESATPESGPGSEPATSGSETPGSEPATSGSETPGSPAGSPTSTEEGTSESATPESGPGTSTEPSEGSAPGTSTEPSEGSAPGSPAGSPTSTEEGTSTEPSEGSAPGTSTEPSEGSAPGTSESATPESGPGTSTEPSEGSAPGTSESATPESGPGSEPATSGSETPGTSTEPSEGSAPGTSTEPSEGSAPGTSESATPESGPGTSESATPESGPGSPAGSPTSTEEGTSESATPESGPGSEPATSGSETPGTSESATPESGPGTSTEPSEGSAPGTSTEPSEGSAPGTSTEPSEGSAPGTSTEPSEGSAPGTSTEPSEGSAPGTSTEPSEGSAPGSPAGSPTSTEEGTSTEPSEGSAPGTSESATPESGPGSEPATSGSETPGTSESATPESGPGSEPATSGSETPGTSESATPESGPGTSTEPSEGSAPGTSESATPESGPGSPAGSPTSTEEGSPAGSPTSTEEGSPAGSPTSTEEGTSESATPESGPGTSTEPSEGSAPGACDTATCVTHRLAGLLSRSGGVVKNMVPTNVGSKAF

SEQ ID NO: 1686 - protein, 760 aa, Artificial Sequence
  Description of Artificial Sequence: Synthetic polypeptide
VPIQKVQDDTKTLIKTIVTRINDISHTQSVSSKQKVTGLDFIPGLHPILTLSKMDQTLAVYQQILTSMPSRNVIQISNDLENLRDLLHVLAFSKSCHLPWASGLETLDSLGGVLEASGYSTEVVALSRLQGSLQDMLWQLDLSPGCGGSPAGSPTSTEEGTSESATPESGPGTSTEPSEGSAPGSPAGSPTSTEEGTSTEPSEGSAPGTSTEPSEGSAPGTSESATPESGPGSEPATSGSETPGSEPATSGSETPGSPAGSPTSTEEGTSESATPESGPGTSTEPSEGSAPGTSTEPSEGSAPGSPAGSPTSTEEGTSTEPSEGSAPGTSTEPSEGSAPGTSESATPESGPGTSTEPSEGSAPGTSESATPESGPGSEPATSGSETPGTSTEPSEGSAPGTSTEPSEGSAPGTSESATPESGPGTSESATPESGPGSPAGSPTSTEEGTSESATPESGPGSEPATSGSETPGTSESATPESGPGTSTEPSEGSAPGTSTEPSEGSAPGTSTEPSEGSAPGTSTEPSEGSAPGTSTEPSEGSAPGTSTEPSEGSAPGSPAGSPTSTEEGTSTEPSEGSAPGTSESATPESGPGSEPATSGSETPGTSESATPESGPGSEPATSGSETPGTSESATPESGPGTSTEPSEGSAPGTSESATPESGPGSPAGSPTSTEEGSPAGSPTSTEEGSPAGSPTSTEEGTSESATPESGPGTSTEPSEGSAPGACDTATCVTHRLAGLLSRSGGVVKNMVPTNVGSKAF

SEQ ID NO: 1687 - protein, 639 aa, Artificial Sequence
  Description of Artificial Sequence: Synthetic polypeptide
FRVDEEFQSPFASQSRGYFLFRPRNGGSPAGSPTSTEEGTSESATPESGPGTSTEPSEGSAPGSPAGSPTSTEEGTSTEPSEGSAPGTSTEPSEGSAPGTSESATPESGPGSEPATSGSETPGSEPATSGSETPGSPAGSPTSTEEGTSESATPESGPGTSTEPSEGSAPGTSTEPSEGSAPGSPAGSPTSTEEGTSTEPSEGSAPGTSTEPSEGSAPGTSESATPESGPGTSTEPSEGSAPGTSESATPESGPGSEPATSGSETPGTSTEPSEGSAPGTSTEPSEGSAPGTSESATPESGPGTSESATPESGPGSPAGSPTSTEEGTSESATPESGPGSEPATSGSETPGTSESATPESGPGTSTEPSEGSAPGTSTEPSEGSAPGTSTEPSEGSAPGTSTEPSEGSAPGTSTEPSEGSAPGTSTEPSEGSAPGSPAGSPTSTEEGTSTEPSEGSAPGTSESATPESGPGSEPATSGSETPGTSESATPESGPGSEPATSGSETPGTSESATPESGPGTSTEPSEGSAPGTSESATPESGPGSPAGSPTSTEEGSPAGSPTSTEEGSPAGSPTSTEEGTSESATPESGPGTSTEPSEGSAPGACDTATCVTHRLAGLLSRSGGVVKNMVPTNVGSKAF

SEQ ID NO: 1688 - protein, 651 aa, Artificial Sequence
  Description of Artificial Sequence: Synthetic polypeptide
HSQGTFTSDYSKYLDSRRAQDFVQWLMNTKRNRNNIAGGSPAGSPTSTEEGTSESATPESGPGTSTEPSEGSAPGSPAGSPTSTEEGTSTEPSEGSAPGTSTEPSEGSAPGTSESATPESGPGSEPATSGSETPGSEPATSGSETPGSPAGSPTSTEEGTSESATPESGPGTSTEPSEGSAPGTSTEPSEGSAPGSPAGSPTSTEEGTSTEPSEGSAPGTSTEPSEGSAPGTSESATPESGPGTSTEPSEGSAPGTSESATPESGPGSEPATSGSETPGTSTEPSEGSAPGTSTEPSEGSAPGTSESATPESGPGTSESATPESGPGSPAGSPTSTEEGTSESATPESGPGSEPATSGSETPGTSESATPESGPGTSTEPSEGSAPGTSTEPSEGSAPGTSTEPSEGSAPGTSTEPSEGSAPGTSTEPSEGSAPGTSTEPSEGSAPGSPAGSPTSTEEGTSTEPSEGSAPGTSESATPESGPGSEPATSGSETPGTSESATPESGPGSEPATSGSETPGTSESATPESGPGTSTEPSEGSAPGTSESATPESGPGSPAGSPTSTEEGSPAGSPTSTEEGSPAGSPTSTEEGTSESATPESGPGTSTEPSEGSAPGACDTATCVTHRLAGLLSRSGGVVKNMVPTNVGSKAF

SEQ ID NO: 1689 - protein, 651 aa, Artificial Sequence
  Description of Artificial Sequence: Synthetic polypeptide
KCNTATCATNRLANFLVHSSNNFGPILPPTNVGSNTYGGSPAGSPTSTEEGTSESATPESGPGTSTEPSEGSAPGSPAGSPTSTEEGTSTEPSEGSAPGTSTEPSEGSAPGTSESATPESGPGSEPATSGSETPGSEPATSGSETPGSPAGSPTSTEEGTSESATPESGPGTSTEPSEGSAPGTSTEPSEGSAPGSPAGSPTSTEEGTSTEPSEGSAPGTSTEPSEGSAPGTSESATPESGPGTSTEPSEGSAPGTSESATPESGPGSEPATSGSETPGTSTEPSEGSAPGTSTEPSEGSAPGTSESATPESGPGTSESATPESGPGSPAGSPTSTEEGTSESATPESGPGSEPATSGSETPGTSESATPESGPGTSTEPSEGSAPGTSTEPSEGSAPGTSTEPSEGSAPGTSTEPSEGSAPGTSTEPSEGSAPGTSTEPSEGSAPGSPAGSPTSTEEGTSTEPSEGSAPGTSESATPESGPGSEPATSGSETPGTSESATPESGPGSEPATSGSETPGTSESATPESGPGTSTEPSEGSAPGTSESATPESGPGSPAGSPTSTEEGSPAGSPTSTEEGSPAGSPTSTEEGTSESATPESGPGTSTEPSEGSAPGACDTATCVTHRLAGLLSRSGGVVKNMVPTNVGSKAF

SEQ ID NO: 1690 - protein, 650 aa, Artificial Sequence
  Description of Artificial Sequence: Synthetic polypeptide
YPIKPEAPGEDASPEELNRYYASLRHYLNLVTRQRYGGSPAGSPTSTEEGTSESATPESGPGTSTEPSEGSAPGSPAGSPTSTEEGTSTEPSEGSAPGTSTEPSEGSAPGTSESATPESGPGSEPATSGSETPGSEPATSGSETPGSPAGSPTSTEEGTSESATPESGPGTSTEPSEGSAPGTSTEPSEGSAPGSPAGSPTSTEEGTSTEPSEGSAPGTSTEPSEGSAPGTSESATPESGPGTSTEPSEGSAPGTSESATPESGPGSEPATSGSETPGTSTEPSEGSAPGTSTEPSEGSAPGTSESATPESGPGTSESATPESGPGSPAGSPTSTEEGTSESATPESGPGSEPATSGSETPGTSESATPESGPGTSTEPSEGSAPGTSTEPSEGSAPGTSTEPSEGSAPGTSTEPSEGSAPGTSTEPSEGSAPGTSTEPSEGSAPGSPAGSPTSTEEGTSTEPSEGSAPGTSESATPESGPGSEPATSGSETPGTSESATPESGPGSEPATSGSETPGTSESATPESGPGTSTEPSEGSAPGTSESATPESGPGSPAGSPTSTEEGSPAGSPTSTEEGSPAGSPTSTEEGTSESATPESGPGTSTEPSEGSAPGACDTATCVTHRLAGLLSRSGGVVKNMVPTNVGSKAF

SEQ ID NO: 1691 - protein, 655 aa, Artificial Sequence
  Description of Artificial Sequence: Synthetic polypeptide
IVLSLDVPIGLLQILLEQARARAAREQATTNARILARVGHCGGSPAGSPTSTEEGTSESATPESGPGTSTEPSEGSAPGSPAGSPTSTEEGTSTEPSEGSAPGTSTEPSEGSAPGTSESATPESGPGSEPATSGSETPGSEPATSGSETPGSPAGSPTSTEEGTSESATPESGPGTSTEPSEGSAPGTSTEPSEGSAPGSPAGSPTSTEEGTSTEPSEGSAPGTSTEPSEGSAPGTSESATPESGPGTSTEPSEGSAPGTSESATPESGPGSEPATSGSETPGTSTEPSEGSAPGTSTEPSEGSAPGTSESATPESGPGTSESATPESGPGSPAGSPTSTEEGTSESATPESGPGSEPATSGSETPGTSESATPESGPGTSTEPSEGSAPGTSTEPSEGSAPGTSTEPSEGSAPGTSTEPSEGSAPGTSTEPSEGSAPGTSTEPSEGSAPGSPAGSPTSTEEGTSTEPSEGSAPGTSESATPESGPGSEPATSGSETPGTSESATPESGPGSEPATSGSETPGTSESATPESGPGTSTEPSEGSAPGTSESATPESGPGSPAGSPTSTEEGSPAGSPTSTEEGSPAGSPTSTEEGTSESATPESGPGTSTEPSEGSAPGACDTATCVTHRLAGLLSRSGGVVKNMVPTNVGSKAF

SEQ ID NO: 1692 - protein, 652 aa, Artificial Sequence
  Description of Artificial Sequence: Synthetic polypeptide
FTLSLDVPTNIMNLLFNIAKAKNLRAQAAANAHLMAQIGGSPAGSPTSTEEGTSESATPESGPGTSTEPSEGSAPGSPAGSPTSTEEGTSTEPSEGSAPGTSTEPSEGSAPGTSESATPESGPGSEPATSGSETPGSEPATSGSETPGSPAGSPTSTEEGTSESATPESGPGTSTEPSEGSAPGTSTEPSEGSAPGSPAGSPTSTEEGTSTEPSEGSAPGTSTEPSEGSAPGTSESATPESGPGTSTEPSEGSAPGTSESATPESGPGSEPATSGSETPGTSTEPSEGSAPGTSTEPSEGSAPGTSESATPESGPGTSESATPESGPGSPAGSPTSTEEGTSESATPESGPGSEPATSGSETPGTSESATPESGPGTSTEPSEGSAPGTSTEPSEGSAPGTSTEPSEGSAPGTSTEPSEGSAPGTSTEPSEGSAPGTSTEPSEGSAPGSPAGSPTSTEEGTSTEPSEGSAPGTSESATPESGPGSEPATSGSETPGTSESATPESGPGSEPATSGSETPGTSESATPESGPGTSTEPSEGSAPGTSESATPESGPGSPAGSPTSTEEGSPAGSPTSTEEGSPAGSPTSTEEGTSESATPESGPGTSTEPSEGSAPGACDTATCVTHRLAGLLSRSGGVVKNMVPTNVGSKAF

SEQ ID NO: 1693 - protein, 619 aa, Artificial Sequence
  Description of Artificial Sequence: Synthetic polypeptide
KAPSGRMSIVKNLQNLDPSHRISDRDYMGWMDFGGSPAGSPTSTEEGTSESATPESGPGTSTEPSEGSAPGSPAGSPTSTEEGTSTEPSEGSAPGTSTEPSEGSAPGTSESATPESGPGSEPATSGSETPGSEPATSGSETPGSPAGSPTSTEEGTSESATPESGPGTSTEPSEGSAPGTSTEPSEGSAPGSPAGSPTSTEEGTSTEPSEGSAPGTSTEPSEGSAPGTSESATPESGPGTSTEPSEGSAPGTSESATPESGPGSEPATSGSETPGTSTEPSEGSAPGTSTEPSEGSAPGTSESATPESGPGTSESATPESGPGSPAGSPTSTEEGTSESATPESGPGSEPATSGSETPGTSESATPESGPGTSTEPSEGSAPGTSTEPSEGSAPGTSTEPSEGSAPGTSTEPSEGSAPGTSTEPSEGSAPGTSTEPSEGSAPGSPAGSPTSTEEGTSTEPSEGSAPGTSESATPESGPGSEPATSGSETPGTSESATPESGPGSEPATSGSETPGTSESATPESGPGTSTEPSEGSAPGTSESATPESGPGSPAGSPTSTEEGSPAGSPTSTEEGSPAGSPTSTEEGTSESATPESGPGTSTEPSEGSAPGDYMGWMDF

SEQ ID NO: 1694 - protein, 650 aa, Artificial Sequence
  Description of Artificial Sequence: Synthetic polypeptide
KAPSGRMSIVKNLQNLDPSHRISDRDYMGWMDFGGSPAGSPTSTEEGTSESATPESGPGTSTEPSEGSAPGSPAGSPTSTEEGTSTEPSEGSAPGTSTEPSEGSAPGTSESATPESGPGSEPATSGSETPGSEPATSGSETPGSPAGSPTSTEEGTSESATPESGPGTSTEPSEGSAPGTSTEPSEGSAPGSPAGSPTSTEEGTSTEPSEGSAPGTSTEPSEGSAPGTSESATPESGPGTSTEPSEGSAPGTSESATPESGPGSEPATSGSETPGTSTEPSEGSAPGTSTEPSEGSAPGTSESATPESGPGTSESATPESGPGSPAGSPTSTEEGTSESATPESGPGSEPATSGSETPGTSESATPESGPGTSTEPSEGSAPGTSTEPSEGSAPGTSTEPSEGSAPGTSTEPSEGSAPGTSTEPSEGSAPGTSTEPSEGSAPGSPAGSPTSTEEGTSTEPSEGSAPGTSESATPESGPGSEPATSGSETPGTSESATPESGPGSEPATSGSETPGTSESATPESGPGTSTEPSEGSAPGTSESATPESGPGSPAGSPTSTEEGSPAGSPTSTEEGSPAGSPTSTEEGTSESATPESGPGTSTEPSEGSAPGHSDGTFTSDLSKQMEEEAVRLFIEWLKNGGPSSGAPPPS

SEQ ID NO: 1695 - protein, 650 aa, Artificial Sequence
  Description of Artificial Sequence: Synthetic polypeptide
KAPSGRMSIVKNLQNLDPSHRISDRDYMGWMDFGGSPAGSPTSTEEGTSESATPESGPGTSTEPSEGSAPGSPAGSPTSTEEGTSTEPSEGSAPGTSTEPSEGSAPGTSESATPESGPGSEPATSGSETPGSEPATSGSETPGSPAGSPTSTEEGTSESATPESGPGTSTEPSEGSAPGTSTEPSEGSAPGSPAGSPTSTEEGTSTEPSEGSAPGTSTEPSEGSAPGTSESATPESGPGTSTEPSEGSAPGTSESATPESGPGSEPATSGSETPGTSTEPSEGSAPGTSTEPSEGSAPGTSESATPESGPGTSESATPESGPGSPAGSPTSTEEGTSESATPESGPGSEPATSGSETPGTSESATPESGPGTSTEPSEGSAPGTSTEPSEGSAPGTSTEPSEGSAPGTSTEPSEGSAPGTSTEPSEGSAPGTSTEPSEGSAPGSPAGSPTSTEEGTSTEPSEGSAPGTSESATPESGPGSEPATSGSETPGTSESATPESGPGSEPATSGSETPGTSESATPESGPGTSTEPSEGSAPGTSESATPESGPGSPAGSPTSTEEGSPAGSPTSTEEGSPAGSPTSTEEGTSESATPESGPGTSTEPSEGSAPGHGEGTFTSDLSKQMEEEAVRLFIEWLKNGGPSSGAPPPS

SEQ ID NO: 1696 - protein, 827 aa, Artificial Sequence
  Description of Artificial Sequence: Synthetic polypeptide
KAPSGRMSIVKNLQNLDPSHRISDRDYMGWMDFGGSPAGSPTSTEEGTSESATPESGPGTSTEPSEGSAPGSPAGSPTSTEEGTSTEPSEGSAPGTSTEPSEGSAPGTSESATPESGPGSEPATSGSETPGSEPATSGSETPGSPAGSPTSTEEGTSESATPESGPGTSTEPSEGSAPGTSTEPSEGSAPGSPAGSPTSTEEGTSTEPSEGSAPGTSTEPSEGSAPGTSESATPESGPGTSTEPSEGSAPGTSESATPESGPGSEPATSGSETPGTSTEPSEGSAPGTSTEPSEGSAPGTSESATPESGPGTSESATPESGPGSPAGSPTSTEEGTSESATPESGPGSEPATSGSETPGTSESATPESGPGTSTEPSEGSAPGTSTEPSEGSAPGTSTEPSEGSAPGTSTEPSEGSAPGTSTEPSEGSAPGTSTEPSEGSAPGSPAGSPTSTEEGTSTEPSEGSAPGTSESATPESGPGSEPATSGSETPGTSESATPESGPGSEPATSGSETPGTSESATPESGPGTSTEPSEGSAPGTSESATPESGPGSPAGSPTSTEEGSPAGSPTSTEEGSPAGSPTSTEEGTSESATPESGPGTSTEPSEGSAPGMRSGCVVVHVWILAGLWLAVAGRPLAFSDAGPHVHYGWGDPIRLRHLYTSGPHGLSSCFLRIRADGVVDCARGQSAHSLLEIKAVALRTVAIKGVHSVRYLCMGADGKMQGLLQYSEEDCAFEEEIRPDGYNVYRSEKHRLPVSLSSAKQRQLYKNRGFLPLSHFLPMLPMVPEEPEDLRGHLESDMFSSPLETDSMDPFGLVTGLEAVRSPSFEK

SEQ ID NO: 1697 - protein, 820 aa, Artificial Sequence
  Description of Artificial Sequence: Synthetic polypeptide
KAPSGRMSIVKNLQNLDPSHRISDRDYMGWMDFGGSPAGSPTSTEEGTSESATPESGPGTSTEPSEGSAPGSPAGSPTSTEEGTSTEPSEGSAPGTSTEPSEGSAPGTSESATPESGPGSEPATSGSETPGSEPATSGSETPGSPAGSPTSTEEGTSESATPESGPGTSTEPSEGSAPGTSTEPSEGSAPGSPAGSPTSTEEGTSTEPSEGSAPGTSTEPSEGSAPGTSESATPESGPGTSTEPSEGSAPGTSESATPESGPGSEPATSGSETPGTSTEPSEGSAPGTSTEPSEGSAPGTSESATPESGPGTSESATPESGPGSPAGSPTSTEEGTSESATPESGPGSEPATSGSETPGTSESATPESGPGTSTEPSEGSAPGTSTEPSEGSAPGTSTEPSEGSAPGTSTEPSEGSAPGTSTEPSEGSAPGTSTEPSEGSAPGSPAGSPTSTEEGTSTEPSEGSAPGTSESATPESGPGSEPATSGSETPGTSESATPESGPGSEPATSGSETPGTSESATPESGPGTSTEPSEGSAPGTSESATPESGPGSPAGSPTSTEEGSPAGSPTSTEEGSPAGSPTSTEEGTSESATPESGPGTSTEPSEGSAPGMDSDETGFEHSGLWVSVLAGLLLGACQAHPIPDSSPLLQFGGQVRQRYLYTDDAQQTEAHLEIREDGTVGGAADQSPESLLQLKALKPGVIQILGVKTSRFLCQRPDGALYGSLHFDPEACSFRELLLEDGYNVYQSEAHGLPLHLPGNKSPHRDPAPRGPARFLPLPGLPPALPEPPGILAPQPPDVGSSDPLSMVGPSQGRSPSYAS

SEQ ID NO: 1698 - protein, 645 aa, Artificial Sequence
  Description of Artificial Sequence: Synthetic polypeptide
KAPSGRMSIVKNLQNLDPSHRISDRDYMGWMDFGGSPAGSPTSTEEGTSESATPESGPGTSTEPSEGSAPGSPAGSPTSTEEGTSTEPSEGSAPGTSTEPSEGSAPGTSESATPESGPGSEPATSGSETPGSEPATSGSETPGSPAGSPTSTEEGTSESATPESGPGTSTEPSEGSAPGTSTEPSEGSAPGSPAGSPTSTEEGTSTEPSEGSAPGTSTEPSEGSAPGTSESATPESGPGTSTEPSEGSAPGTSESATPESGPGSEPATSGSETPGTSTEPSEGSAPGTSTEPSEGSAPGTSESATPESGPGTSESATPESGPGSPAGSPTSTEEGTSESATPESGPGSEPATSGSETPGTSESATPESGPGTSTEPSEGSAPGTSTEPSEGSAPGTSTEPSEGSAPGTSTEPSEGSAPGTSTEPSEGSAPGTSTEPSEGSAPGSPAGSPTSTEEGTSTEPSEGSAPGTSESATPESGPGSEPATSGSETPGTSESATPESGPGSEPATSGSETPGTSESATPESGPGTSTEPSEGSAPGTSESATPESGPGSPAGSPTSTEEGSPAGSPTSTEEGSPAGSPTSTEEGTSESATPESGPGTSTEPSEGSAPGQLGPQGPPHLVADPSKKQGPWLEEEEEAYGWMDF

SEQ ID NO: 1699 - protein, 633 aa, Artificial Sequence
  Description of Artificial Sequence: Synthetic polypeptide
KAPSGRMSIVKNLQNLDPSHRISDRDYMGWMDFGGSPAGSPTSTEEGTSESATPESGPGTSTEPSEGSAPGSPAGSPTSTEEGTSTEPSEGSAPGTSTEPSEGSAPGTSESATPESGPGSEPATSGSETPGSEPATSGSETPGSPAGSPTSTEEGTSESATPESGPGTSTEPSEGSAPGTSTEPSEGSAPGSPAGSPTSTEEGTSTEPSEGSAPGTSTEPSEGSAPGTSESATPESGPGTSTEPSEGSAPGTSESATPESGPGSEPATSGSETPGTSTEPSEGSAPGTSTEPSEGSAPGTSESATPESGPGTSESATPESGPGSPAGSPTSTEEGTSESATPESGPGSEPATSGSETPGTSESATPESGPGTSTEPSEGSAPGTSTEPSEGSAPGTSTEPSEGSAPGTSTEPSEGSAPGTSTEPSEGSAPGTSTEPSEGSAPGSPAGSPTSTEEGTSTEPSEGSAPGTSESATPESGPGSEPATSGSETPGTSESATPESGPGSEPATSGSETPGTSESATPESGPGTSTEPSEGSAPGTSESATPESGPGSPAGSPTSTEEGSPAGSPTSTEEGSPAGSPTSTEEGTSESATPESGPGTSTEPSEGSAPGDPSKKQGPWLEEEEEAYGWMDF

SEQ ID NO: 1700 - protein, 653 aa, Artificial Sequence
  Description of Artificial Sequence: Synthetic polypeptide
KAPSGRMSIVKNLQNLDPSHRISDRDYMGWMDFGGSPAGSPTSTEEGTSESATPESGPGTSTEPSEGSAPGSPAGSPTSTEEGTSTEPSEGSAPGTSTEPSEGSAPGTSESATPESGPGSEPATSGSETPGSEPATSGSETPGSPAGSPTSTEEGTSESATPESGPGTSTEPSEGSAPGTSTEPSEGSAPGSPAGSPTSTEEGTSTEPSEGSAPGTSTEPSEGSAPGTSESATPESGPGTSTEPSEGSAPGTSESATPESGPGSEPATSGSETPGTSTEPSEGSAPGTSTEPSEGSAPGTSESATPESGPGTSESATPESGPGSPAGSPTSTEEGTSESATPESGPGSEPATSGSETPGTSESATPESGPGTSTEPSEGSAPGTSTEPSEGSAPGTSTEPSEGSAPGTSTEPSEGSAPGTSTEPSEGSAPGTSTEPSEGSAPGSPAGSPTSTEEGTSTEPSEGSAPGTSESATPESGPGSEPATSGSETPGTSESATPESGPGSEPATSGSETPGTSESATPESGPGTSTEPSEGSAPGTSESATPESGPGSPAGSPTSTEEGSPAGSPTSTEEGSPAGSPTSTEEGTSESATPESGPGTSTEPSEGSAPGYAEGTFISDYSIAMDKIHQQDFVNWLLAQKGKKNDWKHNITQ

SEQ ID NO: 1701 - protein, 640 aa, Artificial Sequence
  Description of Artificial Sequence: Synthetic polypeptide
KAPSGRMSIVKNLQNLDPSHRISDRDYMGWMDFGGSPAGSPTSTEEGTSESATPESGPGTSTEPSEGSAPGSPAGSPTSTEEGTSTEPSEGSAPGTSTEPSEGSAPGTSESATPESGPGSEPATSGSETPGSEPATSGSETPGSPAGSPTSTEEGTSESATPESGPGTSTEPSEGSAPGTSTEPSEGSAPGSPAGSPTSTEEGTSTEPSEGSAPGTSTEPSEGSAPGTSESATPESGPGTSTEPSEGSAPGTSESATPESGPGSEPATSGSETPGTSTEPSEGSAPGTSTEPSEGSAPGTSESATPESGPGTSESATPESGPGSPAGSPTSTEEGTSESATPESGPGSEPATSGSETPGTSESATPESGPGTSTEPSEGSAPGTSTEPSEGSAPGTSTEPSEGSAPGTSTEPSEGSAPGTSTEPSEGSAPGTSTEPSEGSAPGSPAGSPTSTEEGTSTEPSEGSAPGTSESATPESGPGSEPATSGSETPGTSESATPESGPGSEPATSGSETPGTSESATPESGPGTSTEPSEGSAPGTSESATPESGPGSPAGSPTSTEEGSPAGSPTSTEEGSPAGSPTSTEEGTSESATPESGPGTSTEPSEGSAPGHSQGTFTSDYSKYLDSRRAQDFVQWLMNT

SEQ ID NO: 1702 - protein, 648 aa, Artificial Sequence
  Description of Artificial Sequence: Synthetic polypeptide
KAPSGRMSIVKNLQNLDPSHRISDRDYMGWMDFGGSPAGSPTSTEEGTSESATPESGPGTSTEPSEGSAPGSPAGSPTSTEEGTSTEPSEGSAPGTSTEPSEGSAPGTSESATPESGPGSEPATSGSETPGSEPATSGSETPGSPAGSPTSTEEGTSESATPESGPGTSTEPSEGSAPGTSTEPSEGSAPGSPAGSPTSTEEGTSTEPSEGSAPGTSTEPSEGSAPGTSESATPESGPGTSTEPSEGSAPGTSESATPESGPGSEPATSGSETPGTSTEPSEGSAPGTSTEPSEGSAPGTSESATPESGPGTSESATPESGPGSPAGSPTSTEEGTSESATPESGPGSEPATSGSETPGTSESATPESGPGTSTEPSEGSAPGTSTEPSEGSAPGTSTEPSEGSAPGTSTEPSEGSAPGTSTEPSEGSAPGTSTEPSEGSAPGSPAGSPTSTEEGTSTEPSEGSAPGTSESATPESGPGSEPATSGSETPGTSESATPESGPGSEPATSGSETPGTSESATPESGPGTSTEPSEGSAPGTSESATPESGPGSPAGSPTSTEEGSPAGSPTSTEEGSPAGSPTSTEEGTSESATPESGPGTSTEPSEGSAPGHDEFERHAEGTFTSDVSSTLEGQAALEFIAWLVKGRG

SEQ ID NO: 1703 - protein, 641 aa, Artificial Sequence
  Description of Artificial Sequence: Synthetic polypeptide
KAPSGRMSIVKNLQNLDPSHRISDRDYMGWMDFGGSPAGSPTSTEEGTSESATPESGPGTSTEPSEGSAPGSPAGSPTSTEEGTSTEPSEGSAPGTSTEPSEGSAPGTSESATPESGPGSEPATSGSETPGSEPATSGSETPGSPAGSPTSTEEGTSESATPESGPGTSTEPSEGSAPGTSTEPSEGSAPGSPAGSPTSTEEGTSTEPSEGSAPGTSTEPSEGSAPGTSESATPESGPGTSTEPSEGSAPGTSESATPESGPGSEPATSGSETPGTSTEPSEGSAPGTSTEPSEGSAPGTSESATPESGPGTSESATPESGPGSPAGSPTSTEEGTSESATPESGPGSEPATSGSETPGTSESATPESGPGTSTEPSEGSAPGTSTEPSEGSAPGTSTEPSEGSAPGTSTEPSEGSAPGTSTEPSEGSAPGTSTEPSEGSAPGSPAGSPTSTEEGTSTEPSEGSAPGTSESATPESGPGSEPATSGSETPGTSESATPESGPGSEPATSGSETPGTSESATPESGPGTSTEPSEGSAPGTSESATPESGPGSPAGSPTSTEEGSPAGSPTSTEEGSPAGSPTSTEEGTSESATPESGPGTSTEPSEGSAPGHAEGTFTSDVSSYLEGQAALEFIAWLVKGR

SEQ ID NO: 1704 - protein, 644 aa, Artificial Sequence
  Description of Artificial Sequence: Synthetic polypeptide
KAPSGRMSIVKNLQNLDPSHRISDRDYMGWMDFGGSPAGSPTSTEEGTSESATPESGPGTSTEPSEGSAPGSPAGSPTSTEEGTSTEPSEGSAPGTSTEPSEGSAPGTSESATPESGPGSEPATSGSETPGSEPATSGSETPGSPAGSPTSTEEGTSESATPESGPGTSTEPSEGSAPGTSTEPSEGSAPGSPAGSPTSTEEGTSTEPSEGSAPGTSTEPSEGSAPGTSESATPESGPGTSTEPSEGSAPGTSESATPESGPGSEPATSGSETPGTSTEPSEGSAPGTSTEPSEGSAPGTSESATPESGPGTSESATPESGPGSPAGSPTSTEEGTSESATPESGPGSEPATSGSETPGTSESATPESGPGTSTEPSEGSAPGTSTEPSEGSAPGTSTEPSEGSAPGTSTEPSEGSAPGTSTEPSEGSAPGTSTEPSEGSAPGSPAGSPTSTEEGTSTEPSEGSAPGTSESATPESGPGSEPATSGSETPGTSESATPESGPGSEPATSGSETPGTSESATPESGPGTSTEPSEGSAPGTSESATPESGPGSPAGSPTSTEEGSPAGSPTSTEEGSPAGSPTSTEEGTSESATPESGPGTSTEPSEGSAPGHADGSFSDEMNTILDNLAARDFINWLIETKITD

SEQ ID NO: 1705 - protein, 681 aa, Artificial Sequence
  Description of Artificial Sequence: Synthetic polypeptide
KAPSGRMSIVKNLQNLDPSHRISDRDYMGWMDFGGSPAGSPTSTEEGTSESATPESGPGTSTEPSEGSAPGSPAGSPTSTEEGTSTEPSEGSAPGTSTEPSEGSAPGTSESATPESGPGSEPATSGSETPGSEPATSGSETPGSPAGSPTSTEEGTSESATPESGPGTSTEPSEGSAPGTSTEPSEGSAPGSPAGSPTSTEEGTSTEPSEGSAPGTSTEPSEGSAPGTSESATPESGPGTSTEPSEGSAPGTSESATPESGPGSEPATSGSETPGTSTEPSEGSAPGTSTEPSEGSAPGTSESATPESGPGTSESATPESGPGSPAGSPTSTEEGTSESATPESGPGSEPATSGSETPGTSESATPESGPGTSTEPSEGSAPGTSTEPSEGSAPGTSTEPSEGSAPGTSTEPSEGSAPGTSTEPSEGSAPGTSTEPSEGSAPGSPAGSPTSTEEGTSTEPSEGSAPGTSESATPESGPGSEPATSGSETPGTSESATPESGPGSEPATSGSETPGTSESATPESGPGTSTEPSEGSAPGTSESATPESGPGSPAGSPTSTEEGSPAGSPTSTEEGSPAGSPTSTEEGTSESATPESGPGTSTEPSEGSAPGGPETLCGAELVDALQFVCGDRGFYFNKPTGYGSSSRRAPQTGIVDECCFRSCDLRRLEMYCAPLKPAKSA

SEQ ID NO: 1706 - protein, 678 aa, Artificial Sequence
  Description of Artificial Sequence: Synthetic polypeptide
KAPSGRMSIVKNLQNLDPSHRISDRDYMGWMDFGGSPAGSPTSTEEGTSESATPESGPGTSTEPSEGSAPGSPAGSPTSTEEGTSTEPSEGSAPGTSTEPSEGSAPGTSESATPESGPGSEPATSGSETPGSEPATSGSETPGSPAGSPTSTEEGTSESATPESGPGTSTEPSEGSAPGTSTEPSEGSAPGSPAGSPTSTEEGTSTEPSEGSAPGTSTEPSEGSAPGTSESATPESGPGTSTEPSEGSAPGTSESATPESGPGSEPATSGSETPGTSTEPSEGSAPGTSTEPSEGSAPGTSESATPESGPGTSESATPESGPGSPAGSPTSTEEGTSESATPESGPGSEPATSGSETPGTSESATPESGPGTSTEPSEGSAPGTSTEPSEGSAPGTSTEPSEGSAPGTSTEPSEGSAPGTSTEPSEGSAPGTSTEPSEGSAPGSPAGSPTSTEEGTSTEPSEGSAPGTSESATPESGPGSEPATSGSETPGTSESATPESGPGSEPATSGSETPGTSESATPESGPGTSTEPSEGSAPGTSESATPESGPGSPAGSPTSTEEGSPAGSPTSTEEGSPAGSPTSTEEGTSESATPESGPGTSTEPSEGSAPGAYRPSETLCGGELVDTLQFVCGDRGFYFSRPASRVSRRSRGIVEECCFRSCDLALLETYCATPAKSE

SEQ ID NO: 1707 - protein, 760 aa, Artificial Sequence
  Description of Artificial Sequence: Synthetic polypeptide
KAPSGRMSIVKNLQNLDPSHRISDRDYMGWMDFGGSPAGSPTSTEEGTSESATPESGPGTSTEPSEGSAPGSPAGSPTSTEEGTSTEPSEGSAPGTSTEPSEGSAPGTSESATPESGPGSEPATSGSETPGSEPATSGSETPGSPAGSPTSTEEGTSESATPESGPGTSTEPSEGSAPGTSTEPSEGSAPGSPAGSPTSTEEGTSTEPSEGSAPGTSTEPSEGSAPGTSESATPESGPGTSTEPSEGSAPGTSESATPESGPGSEPATSGSETPGTSTEPSEGSAPGTSTEPSEGSAPGTSESATPESGPGTSESATPESGPGSPAGSPTSTEEGTSESATPESGPGSEPATSGSETPGTSESATPESGPGTSTEPSEGSAPGTSTEPSEGSAPGTSTEPSEGSAPGTSTEPSEGSAPGTSTEPSEGSAPGTSTEPSEGSAPGSPAGSPTSTEEGTSTEPSEGSAPGTSESATPESGPGSEPATSGSETPGTSESATPESGPGSEPATSGSETPGTSESATPESGPGTSTEPSEGSAPGTSESATPESGPGSPAGSPTSTEEGSPAGSPTSTEEGSPAGSPTSTEEGTSESATPESGPGTSTEPSEGSAPGEESQKKLPSSRITCPQGSVAYGSYCYSLILIPQTWSNAELSCQMHFSGHLAFLLSTGEITFVSSLVKNSLTAYQYIWIGLHDPSHGTLPNGSGWKWSSSNVLTFYNWERNPSIAADRGYCAVLSQKSGFQKWRDFNCENELPYICKFKV

SEQ ID NO: 1708 - protein, 658 aa, Artificial Sequence
  Description of Artificial Sequence: Synthetic polypeptide
KAPSGRMSIVKNLQNLDPSHRISDRDYMGWMDFGGSPAGSPTSTEEGTSESATPESGPGTSTEPSEGSAPGSPAGSPTSTEEGTSTEPSEGSAPGTSTEPSEGSAPGTSESATPESGPGSEPATSGSETPGSEPATSGSETPGSPAGSPTSTEEGTSESATPESGPGTSTEPSEGSAPGTSTEPSEGSAPGSPAGSPTSTEEGTSTEPSEGSAPGTSTEPSEGSAPGTSESATPESGPGTSTEPSEGSAPGTSESATPESGPGSEPATSGSETPGTSTEPSEGSAPGTSTEPSEGSAPGTSESATPESGPGTSESATPESGPGSPAGSPTSTEEGTSESATPESGPGSEPATSGSETPGTSESATPESGPGTSTEPSEGSAPGTSTEPSEGSAPGTSTEPSEGSAPGTSTEPSEGSAPGTSTEPSEGSAPGTSTEPSEGSAPGSPAGSPTSTEEGTSTEPSEGSAPGTSESATPESGPGSEPATSGSETPGTSESATPESGPGSEPATSGSETPGTSESATPESGPGTSTEPSEGSAPGTSESATPESGPGSPAGSPTSTEEGSPAGSPTSTEEGSPAGSPTSTEEGTSESATPESGPGTSTEPSEGSAPGTQAQLLRVGCVLGTCQVQNLSHRLWQLMGPAGRQDSAPVDPSSPHSY

SEQ ID NO: 1709 - protein, 757 aa, Artificial Sequence
  Description of Artificial Sequence: Synthetic polypeptide
KAPSGRMSIVKNLQNLDPSHRISDRDYMGWMDFGGSPAGSPTSTEEGTSESATPESGPGTSTEPSEGSAPGSPAGSPTSTEEGTSTEPSEGSAPGTSTEPSEGSAPGTSESATPESGPGSEPATSGSETPGSEPATSGSETPGSPAGSPTSTEEGTSESATPESGPGTSTEPSEGSAPGTSTEPSEGSAPGSPAGSPTSTEEGTSTEPSEGSAPGTSTEPSEGSAPGTSESATPESGPGTSTEPSEGSAPGTSESATPESGPGSEPATSGSETPGTSTEPSEGSAPGTSTEPSEGSAPGTSESATPESGPGTSESATPESGPGSPAGSPTSTEEGTSESATPESGPGSEPATSGSETPGTSESATPESGPGTSTEPSEGSAPGTSTEPSEGSAPGTSTEPSEGSAPGTSTEPSEGSAPGTSTEPSEGSAPGTSTEPSEGSAPGSPAGSPTSTEEGTSTEPSEGSAPGTSESATPESGPGSEPATSGSETPGTSESATPESGPGSEPATSGSETPGTSESATPESGPGTSTEPSEGSAPGTSESATPESGPGSPAGSPTSTEEGSPAGSPTSTEEGSPAGSPTSTEEGTSESATPESGPGTSTEPSEGSAPGVPIQKVQDDTKTLIKTIVTRINDISHTQSVSSKQKVTGLDFIPGLHPILTLSKMDQTLAVYQQILTSMPSRNVIQISNDLENLRDLLHVLAFSKSCHLPWASGLETLDSLGGVLEASGYSTEVVALSRLQGSLQDMLWQLDLSPGC

SEQ ID NO: 1710 - protein, 636 aa, Artificial Sequence
  Description of Artificial Sequence: Synthetic polypeptide
KAPSGRMSIVKNLQNLDPSHRISDRDYMGWMDFGGSPAGSPTSTEEGTSESATPESGPGTSTEPSEGSAPGSPAGSPTSTEEGTSTEPSEGSAPGTSTEPSEGSAPGTSESATPESGPGSEPATSGSETPGSEPATSGSETPGSPAGSPTSTEEGTSESATPESGPGTSTEPSEGSAPGTSTEPSEGSAPGSPAGSPTSTEEGTSTEPSEGSAPGTSTEPSEGSAPGTSESATPESGPGTSTEPSEGSAPGTSESATPESGPGSEPATSGSETPGTSTEPSEGSAPGTSTEPSEGSAPGTSESATPESGPGTSESATPESGPGSPAGSPTSTEEGTSESATPESGPGSEPATSGSETPGTSESATPESGPGTSTEPSEGSAPGTSTEPSEGSAPGTSTEPSEGSAPGTSTEPSEGSAPGTSTEPSEGSAPGTSTEPSEGSAPGSPAGSPTSTEEGTSTEPSEGSAPGTSESATPESGPGSEPATSGSETPGTSESATPESGPGSEPATSGSETPGTSESATPESGPGTSTEPSEGSAPGTSESATPESGPGSPAGSPTSTEEGSPAGSPTSTEEGSPAGSPTSTEEGTSESATPESGPGTSTEPSEGSAPGFRVDEEFQSPFASQSRGYFLFRPRN

SEQ ID NO: 1711 - protein, 648 aa, Artificial Sequence
  Description of Artificial Sequence: Synthetic polypeptide
KAPSGRMSIVKNLQNLDPSHRISDRDYMGWMDFGGSPAGSPTSTEEGTSESATPESGPGTSTEPSEGSAPGSPAGSPTSTEEGTSTEPSEGSAPGTSTEPSEGSAPGTSESATPESGPGSEPATSGSETPGSEPATSGSETPGSPAGSPTSTEEGTSESATPESGPGTSTEPSEGSAPGTSTEPSEGSAPGSPAGSPTSTEEGTSTEPSEGSAPGTSTEPSEGSAPGTSESATPESGPGTSTEPSEGSAPGTSESATPESGPGSEPATSGSETPGTSTEPSEGSAPGTSTEPSEGSAPGTSESATPESGPGTSESATPESGPGSPAGSPTSTEEGTSESATPESGPGSEPATSGSETPGTSESATPESGPGTSTEPSEGSAPGTSTEPSEGSAPGTSTEPSEGSAPGTSTEPSEGSAPGTSTEPSEGSAPGTSTEPSEGSAPGSPAGSPTSTEEGTSTEPSEGSAPGTSESATPESGPGSEPATSGSETPGTSESATPESGPGSEPATSGSETPGTSESATPESGPGTSTEPSEGSAPGTSESATPESGPGSPAGSPTSTEEGSPAGSPTSTEEGSPAGSPTSTEEGTSESATPESGPGTSTEPSEGSAPGHSQGTFTSDYSKYLDSRRAQDFVQWLMNTKRNRNNIA

SEQ ID NO: 1712 - protein, 648 aa, Artificial Sequence
  Description of Artificial Sequence: Synthetic polypeptide
KAPSGRMSIVKNLQNLDPSHRISDRDYMGWMDFGGSPAGSPTSTEEGTSESATPESGPGTSTEPSEGSAPGSPAGSPTSTEEGTSTEPSEGSAPGTSTEPSEGSAPGTSESATPESGPGSEPATSGSETPGSEPATSGSETPGSPAGSPTSTEEGTSESATPESGPGTSTEPSEGSAPGTSTEPSEGSAPGSPAGSPTSTEEGTSTEPSEGSAPGTSTEPSEGSAPGTSESATPESGPGTSTEPSEGSAPGTSESATPESGPGSEPATSGSETPGTSTEPSEGSAPGTSTEPSEGSAPGTSESATPESGPGTSESATPESGPGSPAGSPTSTEEGTSESATPESGPGSEPATSGSETPGTSESATPESGPGTSTEPSEGSAPGTSTEPSEGSAPGTSTEPSEGSAPGTSTEPSEGSAPGTSTEPSEGSAPGTSTEPSEGSAPGSPAGSPTSTEEGTSTEPSEGSAPGTSESATPESGPGSEPATSGSETPGTSESATPESGPGSEPATSGSETPGTSESATPESGPGTSTEPSEGSAPGTSESATPESGPGSPAGSPTSTEEGSPAGSPTSTEEGSPAGSPTSTEEGTSESATPESGPGTSTEPSEGSAPGKCNTATCATNRLANFLVHSSNNFGPILPPTNVGSNTY

SEQ ID NO: 1713 - protein, 647 aa, Artificial Sequence
  Description of Artificial Sequence: Synthetic polypeptide
KAPSGRMSIVKNLQNLDPSHRISDRDYMGWMDFGGSPAGSPTSTEEGTSESATPESGPGTSTEPSEGSAPGSPAGSPTSTEEGTSTEPSEGSAPGTSTEPSEGSAPGTSESATPESGPGSEPATSGSETPGSEPATSGSETPGSPAGSPTSTEEGTSESATPESGPGTSTEPSEGSAPGTSTEPSEGSAPGSPAGSPTSTEEGTSTEPSEGSAPGTSTEPSEGSAPGTSESATPESGPGTSTEPSEGSAPGTSESATPESGPGSEPATSGSETPGTSTEPSEGSAPGTSTEPSEGSAPGTSESATPESGPGTSESATPESGPGSPAGSPTSTEEGTSESATPESGPGSEPATSGSETPGTSESATPESGPGTSTEPSEGSAPGTSTEPSEGSAPGTSTEPSEGSAPGTSTEPSEGSAPGTSTEPSEGSAPGTSTEPSEGSAPGSPAGSPTSTEEGTSTEPSEGSAPGTSESATPESGPGSEPATSGSETPGTSESATPESGPGSEPATSGSETPGTSESATPESGPGTSTEPSEGSAPGTSESATPESGPGSPAGSPTSTEEGSPAGSPTSTEEGSPAGSPTSTEEGTSESATPESGPGTSTEPSEGSAPGYPIKPEAPGEDASPEELNRYYASLRHYLNLVTRQRY

SEQ ID NO: 1714 - protein, 652 aa, Artificial Sequence
  Description of Artificial Sequence: Synthetic polypeptide
KAPSGRMSIVKNLQNLDPSHRISDRDYMGWMDFGGSPAGSPTSTEEGTSESATPESGPGTSTEPSEGSAPGSPAGSPTSTEEGTSTEPSEGSAPGTSTEPSEGSAPGTSESATPESGPGSEPATSGSETPGSEPATSGSETPGSPAGSPTSTEEGTSESATPESGPGTSTEPSEGSAPGTSTEPSEGSAPGSPAGSPTSTEEGTSTEPSEGSAPGTSTEPSEGSAPGTSESATPESGPGTSTEPSEGSAPGTSESATPESGPGSEPATSGSETPGTSTEPSEGSAPGTSTEPSEGSAPGTSESATPESGPGTSESATPESGPGSPAGSPTSTEEGTSESATPESGPGSEPATSGSETPGTSESATPESGPGTSTEPSEGSAPGTSTEPSEGSAPGTSTEPSEGSAPGTSTEPSEGSAPGTSTEPSEGSAPGTSTEPSEGSAPGSPAGSPTSTEEGTSTEPSEGSAPGTSESATPESGPGSEPATSGSETPGTSESATPESGPGSEPATSGSETPGTSESATPESGPGTSTEPSEGSAPGTSESATPESGPGSPAGSPTSTEEGSPAGSPTSTEEGSPAGSPTSTEEGTSESATPESGPGTSTEPSEGSAPGIVLSLDVPIGLLQILLEQARARAAREQATTNARILARVGHC

SEQ ID NO: 1715 - protein, 649 aa, Artificial Sequence
  Description of Artificial Sequence: Synthetic polypeptide
KAPSGRMSIVKNLQNLDPSHRISDRDYMGWMDFGGSPAGSPTSTEEGTSESATPESGPGTSTEPSEGSAPGSPAGSPTSTEEGTSTEPSEGSAPGTSTEPSEGSAPGTSESATPESGPGSEPATSGSETPGSEPATSGSETPGSPAGSPTSTEEGTSESATPESGPGTSTEPSEGSAPGTSTEPSEGSAPGSPAGSPTSTEEGTSTEPSEGSAPGTSTEPSEGSAPGTSESATPESGPGTSTEPSEGSAPGTSESATPESGPGSEPATSGSETPGTSTEPSEGSAPGTSTEPSEGSAPGTSESATPESGPGTSESATPESGPGSPAGSPTSTEEGTSESATPESGPGSEPATSGSETPGTSESATPESGPGTSTEPSEGSAPGTSTEPSEGSAPGTSTEPSEGSAPGTSTEPSEGSAPGTSTEPSEGSAPGTSTEPSEGSAPGSPAGSPTSTEEGTSTEPSEGSAPGTSESATPESGPGSEPATSGSETPGTSESATPESGPGSEPATSGSETPGTSESATPESGPGTSTEPSEGSAPGTSESATPESGPGSPAGSPTSTEEGSPAGSPTSTEEGSPAGSPTSTEEGTSESATPESGPGTSTEPSEGSAPGFTLSLDVPTNIMNLLFNIAKAKNLRAQAAANAHLMAQI

SEQ ID NO: 1716 - protein, 619 aa, Artificial Sequence
  Description of Artificial Sequence: Synthetic polypeptide
DYMGWMDFGGSPAGSPTSTEEGTSESATPESGPGTSTEPSEGSAPGSPAGSPTSTEEGTSTEPSEGSAPGTSTEPSEGSAPGTSESATPESGPGSEPATSGSETPGSEPATSGSETPGSPAGSPTSTEEGTSESATPESGPGTSTEPSEGSAPGTSTEPSEGSAPGSPAGSPTSTEEGTSTEPSEGSAPGTSTEPSEGSAPGTSESATPESGPGTSTEPSEGSAPGTSESATPESGPGSEPATSGSETPGTSTEPSEGSAPGTSTEPSEGSAPGTSESATPESGPGTSESATPESGPGSPAGSPTSTEEGTSESATPESGPGSEPATSGSETPGTSESATPESGPGTSTEPSEGSAPGTSTEPSEGSAPGTSTEPSEGSAPGTSTEPSEGSAPGTSTEPSEGSAPGTSTEPSEGSAPGSPAGSPTSTEEGTSTEPSEGSAPGTSESATPESGPGSEPATSGSETPGTSESATPESGPGSEPATSGSETPGTSESATPESGPGTSTEPSEGSAPGTSESATPESGPGSPAGSPTSTEEGSPAGSPTSTEEGSPAGSPTSTEEGTSESATPESGPGTSTEPSEGSAPGKAPSGRMSIVKNLQNLDPSHRISDRDYMGWMDF

SEQ ID NO: 1717 - protein, 650 aa, Artificial Sequence
  Description of Artificial Sequence: Synthetic polypeptide
HSDGTFTSDLSKQMEEEAVRLFIEWLKNGGPSSGAPPPSGGSPAGSPTSTEEGTSESATPESGPGTSTEPSEGSAPGSPAGSPTSTEEGTSTEPSEGSAPGTSTEPSEGSAPGTSESATPESGPGSEPATSGSETPGSEPATSGSETPGSPAGSPTSTEEGTSESATPESGPGTSTEPSEGSAPGTSTEPSEGSAPGSPAGSPTSTEEGTSTEPSEGSAPGTSTEPSEGSAPGTSESATPESGPGTSTEPSEGSAPGTSESATPESGPGSEPATSGSETPGTSTEPSEGSAPGTSTEPSEGSAPGTSESATPESGPGTSESATPESGPGSPAGSPTSTEEGTSESATPESGPGSEPATSGSETPGTSESATPESGPGTSTEPSEGSAPGTSTEPSEGSAPGTSTEPSEGSAPGTSTEPSEGSAPGTSTEPSEGSAPGTSTEPSEGSAPGSPAGSPTSTEEGTSTEPSEGSAPGTSESATPESGPGSEPATSGSETPGTSESATPESGPGSEPATSGSETPGTSESATPESGPGTSTEPSEGSAPGTSESATPESGPGSPAGSPTSTEEGSPAGSPTSTEEGSPAGSPTSTEEGTSESATPESGPGTSTEPSEGSAPGKAPSGRMSIVKNLQNLDPSHRISDRDYMGWMDF

SEQ ID NO: 1718 - protein, 650 aa, Artificial Sequence
  Description of Artificial Sequence: Synthetic polypeptide
HGEGTFTSDLSKQMEEEAVRLFIEWLKNGGPSSGAPPPSGGSPAGSPTSTEEGTSESATPESGPGTSTEPSEGSAPGSPAGSPTSTEEGTSTEPSEGSAPGTSTEPSEGSAPGTSESATPESGPGSEPATSGSETPGSEPATSGSETPGSPAGSPTSTEEGTSESATPESGPGTSTEPSEGSAPGTSTEPSEGSAPGSPAGSPTSTEEGTSTEPSEGSAPGTSTEPSEGSAPGTSESATPESGPGTSTEPSEGSAPGTSESATPESGPGSEPATSGSETPGTSTEPSEGSAPGTSTEPSEGSAPGTSESATPESGPGTSESATPESGPGSPAGSPTSTEEGTSESATPESGPGSEPATSGSETPGTSESATPESGPGTSTEPSEGSAPGTSTEPSEGSAPGTSTEPSEGSAPGTSTEPSEGSAPGTSTEPSEGSAPGTSTEPSEGSAPGSPAGSPTSTEEGTSTEPSEGSAPGTSESATPESGPGSEPATSGSETPGTSESATPESGPGSEPATSGSETPGTSESATPESGPGTSTEPSEGSAPGTSESATPESGPGSPAGSPTSTEEGSPAGSPTSTEEGSPAGSPTSTEEGTSESATPESGPGTSTEPSEGSAPGKAPSGRMSIVKNLQNLDPSHRISDRDYMGWMDF

SEQ ID NO: 1719 - protein, 827 aa, Artificial Sequence
  Description of Artificial Sequence: Synthetic polypeptide
MRSGCVVVHVWILAGLWLAVAGRPLAFSDAGPHVHYGWGDPIRLRHLYTSGPHGLSSCFLRIRADGVVDCARGQSAHSLLEIKAVALRTVAIKGVHSVRYLCMGADGKMQGLLQYSEEDCAFEEEIRPDGYNVYRSEKHRLPVSLSSAKQRQLYKNRGFLPLSHFLPMLPMVPEEPEDLRGHLESDMFSSPLETDSMDPFGLVTGLEAVRSPSFEKGGSPAGSPTSTEEGTSESATPESGPGTSTEPSEGSAPGSPAGSPTSTEEGTSTEPSEGSAPGTSTEPSEGSAPGTSESATPESGPGSEPATSGSETPGSEPATSGSETPGSPAGSPTSTEEGTSESATPESGPGTSTEPSEGSAPGTSTEPSEGSAPGSPAGSPTSTEEGTSTEPSEGSAPGTSTEPSEGSAPGTSESATPESGPGTSTEPSEGSAPGTSESATPESGPGSEPATSGSETPGTSTEPSEGSAPGTSTEPSEGSAPGTSESATPESGPGTSESATPESGPGSPAGSPTSTEEGTSESATPESGPGSEPATSGSETPGTSESATPESGPGTSTEPSEGSAPGTSTEPSEGSAPGTSTEPSEGSAPGTSTEPSEGSAPGTSTEPSEGSAPGTSTEPSEGSAPGSPAGSPTSTEEGTSTEPSEGSAPGTSESATPESGPGSEPATSGSETPGTSESATPESGPGSEPATSGSETPGTSESATPESGPGTSTEPSEGSAPGTSESATPESGPGSPAGSPTSTEEGSPAGSPTSTEEGSPAGSPTSTEEGTSESATPESGPGTSTEPSEGSAPGKAPSGRMSIVKNLQNLDPSHRISDRDYMGWMDF

SEQ ID NO: 1720 - protein, 820 aa, Artificial Sequence
  Description of Artificial Sequence: Synthetic polypeptide
MDSDETGFEHSGLWVSVLAGLLLGACQAHPIPDSSPLLQFGGQVRQRYLYTDDAQQTEAHLEIREDGTVGGAADQSPESLLQLKALKPGVIQILGVKTSRFLCQRPDGALYGSLHFDPEACSFRELLLEDGYNVYQSEAHGLPLHLPGNKSPHRDPAPRGPARFLPLPGLPPALPEPPGILAPQPPDVGSSDPLSMVGPSQGRSPSYASGGSPAGSPTSTEEGTSESATPESGPGTSTEPSEGSAPGSPAGSPTSTEEGTSTEPSEGSAPGTSTEPSEGSAPGTSESATPESGPGSEPATSGSETPGSEPATSGSETPGSPAGSPTSTEEGTSESATPESGPGTSTEPSEGSAPGTSTEPSEGSAPGSPAGSPTSTEEGTSTEPSEGSAPGTSTEPSEGSAPGTSESATPESGPGTSTEPSEGSAPGTSESATPESGPGSEPATSGSETPGTSTEPSEGSAPGTSTEPSEGSAPGTSESATPESGPGTSESATPESGPGSPAGSPTSTEEGTSESATPESGPGSEPATSGSETPGTSESATPESGPGTSTEPSEGSAPGTSTEPSEGSAPGTSTEPSEGSAPGTSTEPSEGSAPGTSTEPSEGSAPGTSTEPSEGSAPGSPAGSPTSTEEGTSTEPSEGSAPGTSESATPESGPGSEPATSGSETPGTSESATPESGPGSEPATSGSETPGTSESATPESGPGTSTEPSEGSAPGTSESATPESGPGSPAGSPTSTEEGSPAGSPTSTEEGSPAGSPTSTEEGTSESATPESGPGTSTEPSEGSAPGKAPSGRMSIVKNLQNLDPSHRISDRDYMGWMDF

SEQ ID NO: 1721 - protein, 645 aa, Artificial Sequence
  Description of Artificial Sequence: Synthetic polypeptide
QLGPQGPPHLVADPSKKQGPWLEEEEEAYGWMDFGGSPAGSPTSTEEGTSESATPESGPGTSTEPSEGSAPGSPAGSPTSTEEGTSTEPSEGSAPGTSTEPSEGSAPGTSESATPESGPGSEPATSGSETPGSEPATSGSETPGSPAGSPTSTEEGTSESATPESGPGTSTEPSEGSAPGTSTEPSEGSAPGSPAGSPTSTEEGTSTEPSEGSAPGTSTEPSEGSAPGTSESATPESGPGTSTEPSEGSAPGTSESATPESGPGSEPATSGSETPGTSTEPSEGSAPGTSTEPSEGSAPGTSESATPESGPGTSESATPESGPGSPAGSPTSTEEGTSESATPESGPGSEPATSGSETPGTSESATPESGPGTSTEPSEGSAPGTSTEPSEGSAPGTSTEPSEGSAPGTSTEPSEGSAPGTSTEPSEGSAPGTSTEPSEGSAPGSPAGSPTSTEEGTSTEPSEGSAPGTSESATPESGPGSEPATSGSETPGTSESATPESGPGSEPATSGSETPGTSESATPESGPGTSTEPSEGSAPGTSESATPESGPGSPAGSPTSTEEGSPAGSPTSTEEGSPAGSPTSTEEGTSESATPESGPGTSTEPSEGSAPGKAPSGRMSIVKNLQNLDPSHRISDRDYMGWMDF

SEQ ID NO: 1722 - protein, 633 aa, Artificial Sequence
  Description of Artificial Sequence: Synthetic polypeptide
DPSKKQGPWLEEEEEAYGWMDFGGSPAGSPTSTEEGTSESATPESGPGTSTEPSEGSAPGSPAGSPTSTEEGTSTEPSEGSAPGTSTEPSEGSAPGTSESATPESGPGSEPATSGSETPGSEPATSGSETPGSPAGSPTSTEEGTSESATPESGPGTSTEPSEGSAPGTSTEPSEGSAPGSPAGSPTSTEEGTSTEPSEGSAPGTSTEPSEGSAPGTSESATPESGPGTSTEPSEGSAPGTSESATPESGPGSEPATSGSETPGTSTEPSEGSAPGTSTEPSEGSAPGTSESATPESGPGTSESATPESGPGSPAGSPTSTEEGTSESATPESGPGSEPATSGSETPGTSESATPESGPGTSTEPSEGSAPGTSTEPSEGSAPGTSTEPSEGSAPGTSTEPSEGSAPGTSTEPSEGSAPGTSTEPSEGSAPGSPAGSPTSTEEGTSTEPSEGSAPGTSESATPESGPGSEPATSGSETPGTSESATPESGPGSEPATSGSETPGTSESATPESGPGTSTEPSEGSAPGTSESATPESGPGSPAGSPTSTEEGSPAGSPTSTEEGSPAGSPTSTEEGTSESATPESGPGTSTEPSEGSAPGKAPSGRMSIVKNLQNLDPSHRISDRDYMGWMDF

SEQ ID NO: 1723 - protein, 653 aa, Artificial Sequence
  Description of Artificial Sequence: Synthetic polypeptide
YAEGTFISDYSIAMDKIHQQDFVNWLLAQKGKKNDWKHNITQGGSPAGSPTSTEEGTSESATPESGPGTSTEPSEGSAPGSPAGSPTSTEEGTSTEPSEGSAPGTSTEPSEGSAPGTSESATPESGPGSEPATSGSETPGSEPATSGSETPGSPAGSPTSTEEGTSESATPESGPGTSTEPSEGSAPGTSTEPSEGSAPGSPAGSPTSTEEGTSTEPSEGSAPGTSTEPSEGSAPGTSESATPESGPGTSTEPSEGSAPGTSESATPESGPGSEPATSGSETPGTSTEPSEGSAPGTSTEPSEGSAPGTSESATPESGPGTSESATPESGPGSPAGSPTSTEEGTSESATPESGPGSEPATSGSETPGTSESATPESGPGTSTEPSEGSAPGTSTEPSEGSAPGTSTEPSEGSAPGTSTEPSEGSAPGTSTEPSEGSAPGTSTEPSEGSAPGSPAGSPTSTEEGTSTEPSEGSAPGTSESATPESGPGSEPATSGSETPGTSESATPESGPGSEPATSGSETPGTSESATPESGPGTSTEPSEGSAPGTSESATPESGPGSPAGSPTSTEEGSPAGSPTSTEEGSPAGSPTSTEEGTSESATPESGPGTSTEPSEGSAPGKAPSGRMSIVKNLQNLDPSHRISDRDYMGWMDF

SEQ ID NO: 1724 - protein, 640 aa, Artificial Sequence
  Description of Artificial Sequence: Synthetic polypeptide
HSQGTFTSDYSKYLDSRRAQDFVQWLMNTGGSPAGSPTSTEEGTSESATPESGPGTSTEPSEGSAPGSPAGSPTSTEEGTSTEPSEGSAPGTSTEPSEGSAPGTSESATPESGPGSEPATSGSETPGSEPATSGSETPGSPAGSPTSTEEGTSESATPESGPGTSTEPSEGSAPGTSTEPSEGSAPGSPAGSPTSTEEGTSTEPSEGSAPGTSTEPSEGSAPGTSESATPESGPGTSTEPSEGSAPGTSESATPESGPGSEPATSGSETPGTSTEPSEGSAPGTSTEPSEGSAPGTSESATPESGPGTSESATPESGPGSPAGSPTSTEEGTSESATPESGPGSEPATSGSETPGTSESATPESGPGTSTEPSEGSAPGTSTEPSEGSAPGTSTEPSEGSAPGTSTEPSEGSAPGTSTEPSEGSAPGTSTEPSEGSAPGSPAGSPTSTEEGTSTEPSEGSAPGTSESATPESGPGSEPATSGSETPGTSESATPESGPGSEPATSGSETPGTSESATPESGPGTSTEPSEGSAPGTSESATPESGPGSPAGSPTSTEEGSPAGSPTSTEEGSPAGSPTSTEEGTSESATPESGPGTSTEPSEGSAPGKAPSGRMSIVKNLQNLDPSHRISDRDYMGWMDF

SEQ ID NO: 1725 - protein, 648 aa, Artificial Sequence
  Description of Artificial Sequence: Synthetic polypeptide
HDEFERHAEGTFTSDVSSTLEGQAALEFIAWLVKGRGGGSPAGSPTSTEEGTSESATPESGPGTSTEPSEGSAPGSPAGSPTSTEEGTSTEPSEGSAPGTSTEPSEGSAPGTSESATPESGPGSEPATSGSETPGSEPATSGSETPGSPAGSPTSTEEGTSESATPESGPGTSTEPSEGSAPGTSTEPSEGSAPGSPAGSPTSTEEGTSTEPSEGSAPGTSTEPSEGSAPGTSESATPESGPGTSTEPSEGSAPGTSESATPESGPGSEPATSGSETPGTSTEPSEGSAPGTSTEPSEGSAPGTSESATPESGPGTSESATPESGPGSPAGSPTSTEEGTSESATPESGPGSEPATSGSETPGTSESATPESGPGTSTEPSEGSAPGTSTEPSEGSAPGTSTEPSEGSAPGTSTEPSEGSAPGTSTEPSEGSAPGTSTEPSEGSAPGSPAGSPTSTEEGTSTEPSEGSAPGTSESATPESGPGSEPATSGSETPGTSESATPESGPGSEPATSGSETPGTSESATPESGPGTSTEPSEGSAPGTSESATPESGPGSPAGSPTSTEEGSPAGSPTSTEEGSPAGSPTSTEEGTSESATPESGPGTSTEPSEGSAPGKAPSGRMSIVKNLQNLDPSHRISDRDYMGWMDF

SEQ ID NO: 1726 - protein, 641 aa, Artificial Sequence
  Description of Artificial Sequence: Synthetic polypeptide
HAEGTFTSDVSSYLEGQAALEFIAWLVKGRGGSPAGSPTSTEEGTSESATPESGPGTSTEPSEGSAPGSPAGSPTSTEEGTSTEPSEGSAPGTSTEPSEGSAPGTSESATPESGPGSEPATSGSETPGSEPATSGSETPGSPAGSPTSTEEGTSESATPESGPGTSTEPSEGSAPGTSTEPSEGSAPGSPAGSPTSTEEGTSTEPSEGSAPGTSTEPSEGSAPGTSESATPESGPGTSTEPSEGSAPGTSESATPESGPGSEPATSGSETPGTSTEPSEGSAPGTSTEPSEGSAPGTSESATPESGPGTSESATPESGPGSPAGSPTSTEEGTSESATPESGPGSEPATSGSETPGTSESATPESGPGTSTEPSEGSAPGTSTEPSEGSAPGTSTEPSEGSAPGTSTEPSEGSAPGTSTEPSEGSAPGTSTEPSEGSAPGSPAGSPTSTEEGTSTEPSEGSAPGTSESATPESGPGSEPATSGSETPGTSESATPESGPGSEPATSGSETPGTSESATPESGPGTSTEPSEGSAPGTSESATPESGPGSPAGSPTSTEEGSPAGSPTSTEEGSPAGSPTSTEEGTSESATPESGPGTSTEPSEGSAPGKAPSGRMSIVKNLQNLDPSHRISDRDYMGWMDF

SEQ ID NO: 1727 - protein, 644 aa, Artificial Sequence
  Description of Artificial Sequence: Synthetic polypeptide
HADGSFSDEMNTILDNLAARDFINWLIETKITDGGSPAGSPTSTEEGTSESATPESGPGTSTEPSEGSAPGSPAGSPTSTEEGTSTEPSEGSAPGTSTEPSEGSAPGTSESATPESGPGSEPATSGSETPGSEPATSGSETPGSPAGSPTSTEEGTSESATPESGPGTSTEPSEGSAPGTSTEPSEGSAPGSPAGSPTSTEEGTSTEPSEGSAPGTSTEPSEGSAPGTSESATPESGPGTSTEPSEGSAPGTSESATPESGPGSEPATSGSETPGTSTEPSEGSAPGTSTEPSEGSAPGTSESATPESGPGTSESATPESGPGSPAGSPTSTEEGTSESATPESGPGSEPATSGSETPGTSESATPESGPGTSTEPSEGSAPGTSTEPSEGSAPGTSTEPSEGSAPGTSTEPSEGSAPGTSTEPSEGSAPGTSTEPSEGSAPGSPAGSPTSTEEGTSTEPSEGSAPGTSESATPESGPGSEPATSGSETPGTSESATPESGPGSEPATSGSETPGTSESATPESGPGTSTEPSEGSAPGTSESATPESGPGSPAGSPTSTEEGSPAGSPTSTEEGSPAGSPTSTEEGTSESATPESGPGTSTEPSEGSAPGKAPSGRMSIVKNLQNLDPSHRISDRDYMGWMDF

SEQ ID NO: 1728 - protein, 681 aa, Artificial Sequence
  Description of Artificial Sequence: Synthetic polypeptide
GPETLCGAELVDALQFVCGDRGFYFNKPTGYGSSSRRAPQTGIVDECCFRSCDLRRLEMYCAPLKPAKSAGGSPAGSPTSTEEGTSESATPESGPGTSTEPSEGSAPGSPAGSPTSTEEGTSTEPSEGSAPGTSTEPSEGSAPGTSESATPESGPGSEPATSGSETPGSEPATSGSETPGSPAGSPTSTEEGTSESATPESGPGTSTEPSEGSAPGTSTEPSEGSAPGSPAGSPTSTEEGTSTEPSEGSAPGTSTEPSEGSAPGTSESATPESGPGTSTEPSEGSAPGTSESATPESGPGSEPATSGSETPGTSTEPSEGSAPGTSTEPSEGSAPGTSESATPESGPGTSESATPESGPGSPAGSPTSTEEGTSESATPESGPGSEPATSGSETPGTSESATPESGPGTSTEPSEGSAPGTSTEPSEGSAPGTSTEPSEGSAPGTSTEPSEGSAPGTSTEPSEGSAPGTSTEPSEGSAPGSPAGSPTSTEEGTSTEPSEGSAPGTSESATPESGPGSEPATSGSETPGTSESATPESGPGSEPATSGSETPGTSESATPESGPGTSTEPSEGSAPGTSESATPESGPGSPAGSPTSTEEGSPAGSPTSTEEGSPAGSPTSTEEGTSESATPESGPGTSTEPSEGSAPGKAPSGRMSIVKNLQNLDPSHRISDRDYMGWMDF

SEQ ID NO: 1729 - protein, 678 aa, Artificial Sequence
  Description of Artificial Sequence: Synthetic polypeptide
AYRPSETLCGGELVDTLQFVCGDRGFYFSRPASRVSRRSRGIVEECCFRSCDLALLETYCATPAKSEGGSPAGSPTSTEEGTSESATPESGPGTSTEPSEGSAPGSPAGSPTSTEEGTSTEPSEGSAPGTSTEPSEGSAPGTSESATPESGPGSEPATSGSETPGSEPATSGSETPGSPAGSPTSTEEGTSESATPESGPGTSTEPSEGSAPGTSTEPSEGSAPGSPAGSPTSTEEGTSTEPSEGSAPGTSTEPSEGSAPGTSESATPESGPGTSTEPSEGSAPGTSESATPESGPGSEPATSGSETPGTSTEPSEGSAPGTSTEPSEGSAPGTSESATPESGPGTSESATPESGPGSPAGSPTSTEEGTSESATPESGPGSEPATSGSETPGTSESATPESGPGTSTEPSEGSAPGTSTEPSEGSAPGTSTEPSEGSAPGTSTEPSEGSAPGTSTEPSEGSAPGTSTEPSEGSAPGSPAGSPTSTEEGTSTEPSEGSAPGTSESATPESGPGSEPATSGSETPGTSESATPESGPGSEPATSGSETPGTSESATPESGPGTSTEPSEGSAPGTSESATPESGPGSPAGSPTSTEEGSPAGSPTSTEEGSPAGSPTSTEEGTSESATPESGPGTSTEPSEGSAPGKAPSGRMSIVKNLQNLDPSHRISDRDYMGWMDF

SEQ ID NO: 1730 - protein, 760 aa, Artificial Sequence
  Description of Artificial Sequence: Synthetic polypeptide
EESQKKLPSSRITCPQGSVAYGSYCYSLILIPQTWSNAELSCQMHFSGHLAFLLSTGEITFVSSLVKNSLTAYQYIWIGLHDPSHGTLPNGSGWKWSSSNVLTFYNWERNPSIAADRGYCAVLSQKSGFQKWRDFNCENELPYICKFKVGGSPAGSPTSTEEGTSESATPESGPGTSTEPSEGSAPGSPAGSPTSTEEGTSTEPSEGSAPGTSTEPSEGSAPGTSESATPESGPGSEPATSGSETPGSEPATSGSETPGSPAGSPTSTEEGTSESATPESGPGTSTEPSEGSAPGTSTEPSEGSAPGSPAGSPTSTEEGTSTEPSEGSAPGTSTEPSEGSAPGTSESATPESGPGTSTEPSEGSAPGTSESATPESGPGSEPATSGSETPGTSTEPSEGSAPGTSTEPSEGSAPGTSESATPESGPGTSESATPESGPGSPAGSPTSTEEGTSESATPESGPGSEPATSGSETPGTSESATPESGPGTSTEPSEGSAPGTSTEPSEGSAPGTSTEPSEGSAPGTSTEPSEGSAPGTSTEPSEGSAPGTSTEPSEGSAPGSPAGSPTSTEEGTSTEPSEGSAPGTSESATPESGPGSEPATSGSETPGTSESATPESGPGSEPATSGSETPGTSESATPESGPGTSTEPSEGSAPGTSESATPESGPGSPAGSPTSTEEGSPAGSPTSTEEGSPAGSPTSTEEGTSESATPESGPGTSTEPSEGSAPGKAPSGRMSIVKNLQNLDPSHRISDRDYMGWMDF

SEQ ID NO: 1731 - protein, 658 aa, Artificial Sequence
  Description of Artificial Sequence: Synthetic polypeptide
TQAQLLRVGCVLGTCQVQNLSHRLWQLMGPAGRQDSAPVDPSSPHSYGGSPAGSPTSTEEGTSESATPESGPGTSTEPSEGSAPGSPAGSPTSTEEGTSTEPSEGSAPGTSTEPSEGSAPGTSESATPESGPGSEPATSGSETPGSEPATSGSETPGSPAGSPTSTEEGTSESATPESGPGTSTEPSEGSAPGTSTEPSEGSAPGSPAGSPTSTEEGTSTEPSEGSAPGTSTEPSEGSAPGTSESATPESGPGTSTEPSEGSAPGTSESATPESGPGSEPATSGSETPGTSTEPSEGSAPGTSTEPSEGSAPGTSESATPESGPGTSESATPESGPGSPAGSPTSTEEGTSESATPESGPGSEPATSGSETPGTSESATPESGPGTSTEPSEGSAPGTSTEPSEGSAPGTSTEPSEGSAPGTSTEPSEGSAPGTSTEPSEGSAPGTSTEPSEGSAPGSPAGSPTSTEEGTSTEPSEGSAPGTSESATPESGPGSEPATSGSETPGTSESATPESGPGSEPATSGSETPGTSESATPESGPGTSTEPSEGSAPGTSESATPESGPGSPAGSPTSTEEGSPAGSPTSTEEGSPAGSPTSTEEGTSESATPESGPGTSTEPSEGSAPGKAPSGRMSIVKNLQNLDPSHRISDRDYMGWMDF

SEQ ID NO: 1732 - protein, 757 aa, Artificial Sequence
  Description of Artificial Sequence: Synthetic polypeptide
VPIQKVQDDTKTLIKTIVTRINDISHTQSVSSKQKVTGLDFIPGLHPILTLSKMDQTLAVYQQILTSMPSRNVIQISNDLENLRDLLHVLAFSKSCHLPWASGLETLDSLGGVLEASGYSTEVVALSRLQGSLQDMLWQLDLSPGCGGSPAGSPTSTEEGTSESATPESGPGTSTEPSEGSAPGSPAGSPTSTEEGTSTEPSEGSAPGTSTEPSEGSAPGTSESATPESGPGSEPATSGSETPGSEPATSGSETPGSPAGSPTSTEEGTSESATPESGPGTSTEPSEGSAPGTSTEPSEGSAPGSPAGSPTSTEEGTSTEPSEGSAPGTSTEPSEGSAPGTSESATPESGPGTSTEPSEGSAPGTSESATPESGPGSEPATSGSETPGTSTEPSEGSAPGTSTEPSEGSAPGTSESATPESGPGTSESATPESGPGSPAGSPTSTEEGTSESATPESGPGSEPATSGSETPGTSESATPESGPGTSTEPSEGSAPGTSTEPSEGSAPGTSTEPSEGSAPGTSTEPSEGSAPGTSTEPSEGSAPGTSTEPSEGSAPGSPAGSPTSTEEGTSTEPSEGSAPGTSESATPESGPGSEPATSGSETPGTSESATPESGPGSEPATSGSETPGTSESATPESGPGTSTEPSEGSAPGTSESATPESGPGSPAGSPTSTEEGSPAGSPTSTEEGSPAGSPTSTEEGTSESATPESGPGTSTEPSEGSAPGKAPSGRMSIVKNLQNLDPSHRISDRDYMGWMDF

SEQ ID NO: 1733 - protein, 636 aa, Artificial Sequence
  Description of Artificial Sequence: Synthetic polypeptide
FRVDEEFQSPFASQSRGYFLFRPRNGGSPAGSPTSTEEGTSESATPESGPGTSTEPSEGSAPGSPAGSPTSTEEGTSTEPSEGSAPGTSTEPSEGSAPGTSESATPESGPGSEPATSGSETPGSEPATSGSETPGSPAGSPTSTEEGTSESATPESGPGTSTEPSEGSAPGTSTEPSEGSAPGSPAGSPTSTEEGTSTEPSEGSAPGTSTEPSEGSAPGTSESATPESGPGTSTEPSEGSAPGTSESATPESGPGSEPATSGSETPGTSTEPSEGSAPGTSTEPSEGSAPGTSESATPESGPGTSESATPESGPGSPAGSPTSTEEGTSESATPESGPGSEPATSGSETPGTSESATPESGPGTSTEPSEGSAPGTSTEPSEGSAPGTSTEPSEGSAPGTSTEPSEGSAPGTSTEPSEGSAPGTSTEPSEGSAPGSPAGSPTSTEEGTSTEPSEGSAPGTSESATPESGPGSEPATSGSETPGTSESATPESGPGSEPATSGSETPGTSESATPESGPGTSTEPSEGSAPGTSESATPESGPGSPAGSPTSTEEGSPAGSPTSTEEGSPAGSPTSTEEGTSESATPESGPGTSTEPSEGSAPGKAPSGRMSIVKNLQNLDPSHRISDRDYMGWMDF

SEQ ID NO: 1734 - protein, 648 aa, Artificial Sequence
  Description of Artificial Sequence: Synthetic polypeptide
HSQGTFTSDYSKYLDSRRAQDFVQWLMNTKRNRNNIAGGSPAGSPTSTEEGTSESATPESGPGTSTEPSEGSAPGSPAGSPTSTEEGTSTEPSEGSAPGTSTEPSEGSAPGTSESATPESGPGSEPATSGSETPGSEPATSGSETPGSPAGSPTSTEEGTSESATPESGPGTSTEPSEGSAPGTSTEPSEGSAPGSPAGSPTSTEEGTSTEPSEGSAPGTSTEPSEGSAPGTSESATPESGPGTSTEPSEGSAPGTSESATPESGPGSEPATSGSETPGTSTEPSEGSAPGTSTEPSEGSAPGTSESATPESGPGTSESATPESGPGSPAGSPTSTEEGTSESATPESGPGSEPATSGSETPGTSESATPESGPGTSTEPSEGSAPGTSTEPSEGSAPGTSTEPSEGSAPGTSTEPSEGSAPGTSTEPSEGSAPGTSTEPSEGSAPGSPAGSPTSTEEGTSTEPSEGSAPGTSESATPESGPGSEPATSGSETPGTSESATPESGPGSEPATSGSETPGTSESATPESGPGTSTEPSEGSAPGTSESATPESGPGSPAGSPTSTEEGSPAGSPTSTEEGSPAGSPTSTEEGTSESATPESGPGTSTEPSEGSAPGKAPSGRMSIVKNLQNLDPSHRISDRDYMGWMDF

SEQ ID NO: 1735 - protein, 648 aa, Artificial Sequence
  Description of Artificial Sequence: Synthetic polypeptide
KCNTATCATNRLANFLVHSSNNFGPILPPTNVGSNTYGGSPAGSPTSTEEGTSESATPESGPGTSTEPSEGSAPGSPAGSPTSTEEGTSTEPSEGSAPGTSTEPSEGSAPGTSESATPESGPGSEPATSGSETPGSEPATSGSETPGSPAGSPTSTEEGTSESATPESGPGTSTEPSEGSAPGTSTEPSEGSAPGSPAGSPTSTEEGTSTEPSEGSAPGTSTEPSEGSAPGTSESATPESGPGTSTEPSEGSAPGTSESATPESGPGSEPATSGSETPGTSTEPSEGSAPGTSTEPSEGSAPGTSESATPESGPGTSESATPESGPGSPAGSPTSTEEGTSESATPESGPGSEPATSGSETPGTSESATPESGPGTSTEPSEGSAPGTSTEPSEGSAPGTSTEPSEGSAPGTSTEPSEGSAPGTSTEPSEGSAPGTSTEPSEGSAPGSPAGSPTSTEEGTSTEPSEGSAPGTSESATPESGPGSEPATSGSETPGTSESATPESGPGSEPATSGSETPGTSESATPESGPGTSTEPSEGSAPGTSESATPESGPGSPAGSPTSTEEGSPAGSPTSTEEGSPAGSPTSTEEGTSESATPESGPGTSTEPSEGSAPGKAPSGRMSIVKNLQNLDPSHRISDRDYMGWMDF

SEQ ID NO: 1736 - protein, 647 aa, Artificial Sequence
  Description of Artificial Sequence: Synthetic polypeptide
YPIKPEAPGEDASPEELNRYYASLRHYLNLVTRQRYGGSPAGSPTSTEEGTSESATPESGPGTSTEPSEGSAPGSPAGSPTSTEEGTSTEPSEGSAPGTSTEPSEGSAPGTSESATPESGPGSEPATSGSETPGSEPATSGSETPGSPAGSPTSTEEGTSESATPESGPGTSTEPSEGSAPGTSTEPSEGSAPGSPAGSPTSTEEGTSTEPSEGSAPGTSTEPSEGSAPGTSESATPESGPGTSTEPSEGSAPGTSESATPESGPGSEPATSGSETPGTSTEPSEGSAPGTSTEPSEGSAPGTSESATPESGPGTSESATPESGPGSPAGSPTSTEEGTSESATPESGPGSEPATSGSETPGTSESATPESGPGTSTEPSEGSAPGTSTEPSEGSAPGTSTEPSEGSAPGTSTEPSEGSAPGTSTEPSEGSAPGTSTEPSEGSAPGSPAGSPTSTEEGTSTEPSEGSAPGTSESATPESGPGSEPATSGSETPGTSESATPESGPGSEPATSGSETPGTSESATPESGPGTSTEPSEGSAPGTSESATPESGPGSPAGSPTSTEEGSPAGSPTSTEEGSPAGSPTSTEEGTSESATPESGPGTSTEPSEGSAPGKAPSGRMSIVKNLQNLDPSHRISDRDYMGWMDF

SEQ ID NO: 1737 - protein, 652 aa, Artificial Sequence
  Description of Artificial Sequence: Synthetic polypeptide
IVLSLDVPIGLLQILLEQARARAAREQATTNARILARVGHCGGSPAGSPTSTEEGTSESATPESGPGTSTEPSEGSAPGSPAGSPTSTEEGTSTEPSEGSAPGTSTEPSEGSAPGTSESATPESGPGSEPATSGSETPGSEPATSGSETPGSPAGSPTSTEEGTSESATPESGPGTSTEPSEGSAPGTSTEPSEGSAPGSPAGSPTSTEEGTSTEPSEGSAPGTSTEPSEGSAPGTSESATPESGPGTSTEPSEGSAPGTSESATPESGPGSEPATSGSETPGTSTEPSEGSAPGTSTEPSEGSAPGTSESATPESGPGTSESATPESGPGSPAGSPTSTEEGTSESATPESGPGSEPATSGSETPGTSESATPESGPGTSTEPSEGSAPGTSTEPSEGSAPGTSTEPSEGSAPGTSTEPSEGSAPGTSTEPSEGSAPGTSTEPSEGSAPGSPAGSPTSTEEGTSTEPSEGSAPGTSESATPESGPGSEPATSGSETPGTSESATPESGPGSEPATSGSETPGTSESATPESGPGTSTEPSEGSAPGTSESATPESGPGSPAGSPTSTEEGSPAGSPTSTEEGSPAGSPTSTEEGTSESATPESGPGTSTEPSEGSAPGKAPSGRMSIVKNLQNLDPSHRISDRDYMGWMDF

SEQ ID NO: 1738 - protein, 649 aa, Artificial Sequence
  Description of Artificial Sequence: Synthetic polypeptide
FTLSLDVPTNIMNLLFNIAKAKNLRAQAAANAHLMAQIGGSPAGSPTSTEEGTSESATPESGPGTSTEPSEGSAPGSPAGSPTSTEEGTSTEPSEGSAPGTSTEPSEGSAPGTSESATPESGPGSEPATSGSETPGSEPATSGSETPGSPAGSPTSTEEGTSESATPESGPGTSTEPSEGSAPGTSTEPSEGSAPGSPAGSPTSTEEGTSTEPSEGSAPGTSTEPSEGSAPGTSESATPESGPGTSTEPSEGSAPGTSESATPESGPGSEPATSGSETPGTSTEPSEGSAPGTSTEPSEGSAPGTSESATPESGPGTSESATPESGPGSPAGSPTSTEEGTSESATPESGPGSEPATSGSETPGTSESATPESGPGTSTEPSEGSAPGTSTEPSEGSAPGTSTEPSEGSAPGTSTEPSEGSAPGTSTEPSEGSAPGTSTEPSEGSAPGSPAGSPTSTEEGTSTEPSEGSAPGTSESATPESGPGSEPATSGSETPGTSESATPESGPGSEPATSGSETPGTSESATPESGPGTSTEPSEGSAPGTSESATPESGPGSPAGSPTSTEEGSPAGSPTSTEEGSPAGSPTSTEEGTSESATPESGPGTSTEPSEGSAPGKAPSGRMSIVKNLQNLDPSHRISDRDYMGWMDF

SEQ ID NO: 1739 - protein, 625 aa, Artificial Sequence
  Description of Artificial Sequence: Synthetic polypeptide
DYMGWMDFGGSPAGSPTSTEEGTSESATPESGPGTSTEPSEGSAPGSPAGSPTSTEEGTSTEPSEGSAPGTSTEPSEGSAPGTSESATPESGPGSEPATSGSETPGSEPATSGSETPGSPAGSPTSTEEGTSESATPESGPGTSTEPSEGSAPGTSTEPSEGSAPGSPAGSPTSTEEGTSTEPSEGSAPGTSTEPSEGSAPGTSESATPESGPGTSTEPSEGSAPGTSESATPESGPGSEPATSGSETPGTSTEPSEGSAPGTSTEPSEGSAPGTSESATPESGPGTSESATPESGPGSPAGSPTSTEEGTSESATPESGPGSEPATSGSETPGTSESATPESGPGTSTEPSEGSAPGTSTEPSEGSAPGTSTEPSEGSAPGTSTEPSEGSAPGTSTEPSEGSAPGTSTEPSEGSAPGSPAGSPTSTEEGTSTEPSEGSAPGTSESATPESGPGSEPATSGSETPGTSESATPESGPGSEPATSGSETPGTSESATPESGPGTSTEPSEGSAPGTSESATPESGPGSPAGSPTSTEEGSPAGSPTSTEEGSPAGSPTSTEEGTSESATPESGPGTSTEPSEGSAPGHSDGTFTSDLSKQMEEEAVRLFIEWLKNGGPSSGAPPPS

SEQ ID NO: 1740 - protein, 625 aa, Artificial Sequence
  Description of Artificial Sequence: Synthetic polypeptide
DYMGWMDFGGSPAGSPTSTEEGTSESATPESGPGTSTEPSEGSAPGSPAGSPTSTEEGTSTEPSEGSAPGTSTEPSEGSAPGTSESATPESGPGSEPATSGSETPGSEPATSGSETPGSPAGSPTSTEEGTSESATPESGPGTSTEPSEGSAPGTSTEPSEGSAPGSPAGSPTSTEEGTSTEPSEGSAPGTSTEPSEGSAPGTSESATPESGPGTSTEPSEGSAPGTSESATPESGPGSEPATSGSETPGTSTEPSEGSAPGTSTEPSEGSAPGTSESATPESGPGTSESATPESGPGSPAGSPTSTEEGTSESATPESGPGSEPATSGSETPGTSESATPESGPGTSTEPSEGSAPGTSTEPSEGSAPGTSTEPSEGSAPGTSTEPSEGSAPGTSTEPSEGSAPGTSTEPSEGSAPGSPAGSPTSTEEGTSTEPSEGSAPGTSESATPESGPGSEPATSGSETPGTSESATPESGPGSEPATSGSETPGTSESATPESGPGTSTEPSEGSAPGTSESATPESGPGSPAGSPTSTEEGSPAGSPTSTEEGSPAGSPTSTEEGTSESATPESGPGTSTEPSEGSAPGHGEGTFTSDLSKQMEEEAVRLFIEWLKNGGPSSGAPPPS

SEQ ID NO: 1741 - protein, 802 aa, Artificial Sequence
  Description of Artificial Sequence: Synthetic polypeptide
DYMGWMDFGGSPAGSPTSTEEGTSESATPESGPGTSTEPSEGSAPGSPAGSPTSTEEGTSTEPSEGSAPGTSTEPSEGSAPGTSESATPESGPGSEPATSGSETPGSEPATSGSETPGSPAGSPTSTEEGTSESATPESGPGTSTEPSEGSAPGTSTEPSEGSAPGSPAGSPTSTEEGTSTEPSEGSAPGTSTEPSEGSAPGTSESATPESGPGTSTEPSEGSAPGTSESATPESGPGSEPATSGSETPGTSTEPSEGSAPGTSTEPSEGSAPGTSESATPESGPGTSESATPESGPGSPAGSPTSTEEGTSESATPESGPGSEPATSGSETPGTSESATPESGPGTSTEPSEGSAPGTSTEPSEGSAPGTSTEPSEGSAPGTSTEPSEGSAPGTSTEPSEGSAPGTSTEPSEGSAPGSPAGSPTSTEEGTSTEPSEGSAPGTSESATPESGPGSEPATSGSETPGTSESATPESGPGSEPATSGSETPGTSESATPESGPGTSTEPSEGSAPGTSESATPESGPGSPAGSPTSTEEGSPAGSPTSTEEGSPAGSPTSTEEGTSESATPESGPGTSTEPSEGSAPGMRSGCVVVHVWILAGLWLAVAGRPLAFSDAGPHVHYGWGDPIRLRHLYTSGPHGLSSCFLRIRADGVVDCARGQSAHSLLEIKAVALRTVAIKGVHSVRYLCMGADGKMQGLLQYSEEDCAFEEEIRPDGYNVYRSEKHRLPVSLSSAKQRQLYKNRGFLPLSHFLPMLPMVPEEPEDLRGHLESDMFSSPLETDSMDPFGLVTGLEAVRSPSFEK

SEQ ID NO: 1742 - protein, 795 aa, Artificial Sequence
  Description of Artificial Sequence: Synthetic polypeptide
DYMGWMDFGGSPAGSPTSTEEGTSESATPESGPGTSTEPSEGSAPGSPAGSPTSTEEGTSTEPSEGSAPGTSTEPSEGSAPGTSESATPESGPGSEPATSGSETPGSEPATSGSETPGSPAGSPTSTEEGTSESATPESGPGTSTEPSEGSAPGTSTEPSEGSAPGSPAGSPTSTEEGTSTEPSEGSAPGTSTEPSEGSAPGTSESATPESGPGTSTEPSEGSAPGTSESATPESGPGSEPATSGSETPGTSTEPSEGSAPGTSTEPSEGSAPGTSESATPESGPGTSESATPESGPGSPAGSPTSTEEGTSESATPESGPGSEPATSGSETPGTSESATPESGPGTSTEPSEGSAPGTSTEPSEGSAPGTSTEPSEGSAPGTSTEPSEGSAPGTSTEPSEGSAPGTSTEPSEGSAPGSPAGSPTSTEEGTSTEPSEGSAPGTSESATPESGPGSEPATSGSETPGTSESATPESGPGSEPATSGSETPGTSESATPESGPGTSTEPSEGSAPGTSESATPESGPGSPAGSPTSTEEGSPAGSPTSTEEGSPAGSPTSTEEGTSESATPESGPGTSTEPSEGSAPGMDSDETGFEHSGLWVSVLAGLLLGACQAHPIPDSSPLLQFGGQVRQRYLYTDDAQQTEAHLEIREDGTVGGAADQSPESLLQLKALKPGVIQILGVKTSRFLCQRPDGALYGSLHFDPEACSFRELLLEDGYNVYQSEAHGLPLHLPGNKSPHRDPAPRGPARFLPLPGLPPALPEPPGILAPQPPDVGSSDPLSMVGPSQGRSPSYAS

SEQ ID NO: 1743 - protein, 620 aa, Artificial Sequence
  Description of Artificial Sequence: Synthetic polypeptide
DYMGWMDFGGSPAGSPTSTEEGTSESATPESGPGTSTEPSEGSAPGSPAGSPTSTEEGTSTEPSEGSAPGTSTEPSEGSAPGTSESATPESGPGSEPATSGSETPGSEPATSGSETPGSPAGSPTSTEEGTSESATPESGPGTSTEPSEGSAPGTSTEPSEGSAPGSPAGSPTSTEEGTSTEPSEGSAPGTSTEPSEGSAPGTSESATPESGPGTSTEPSEGSAPGTSESATPESGPGSEPATSGSETPGTSTEPSEGSAPGTSTEPSEGSAPGTSESATPESGPGTSESATPESGPGSPAGSPTSTEEGTSESATPESGPGSEPATSGSETPGTSESATPESGPGTSTEPSEGSAPGTSTEPSEGSAPGTSTEPSEGSAPGTSTEPSEGSAPGTSTEPSEGSAPGTSTEPSEGSAPGSPAGSPTSTEEGTSTEPSEGSAPGTSESATPESGPGSEPATSGSETPGTSESATPESGPGSEPATSGSETPGTSESATPESGPGTSTEPSEGSAPGTSESATPESGPGSPAGSPTSTEEGSPAGSPTSTEEGSPAGSPTSTEEGTSESATPESGPGTSTEPSEGSAPGQLGPQGPPHLVADPSKKQGPWLEEEEEAYGWMDF

SEQ ID NO: 1744 - protein, 608 aa, Artificial Sequence
  Description of Artificial Sequence: Synthetic polypeptide
DYMGWMDFGGSPAGSPTSTEEGTSESATPESGPGTSTEPSEGSAPGSPAGSPTSTEEGTSTEPSEGSAPGTSTEPSEGSAPGTSESATPESGPGSEPATSGSETPGSEPATSGSETPGSPAGSPTSTEEGTSESATPESGPGTSTEPSEGSAPGTSTEPSEGSAPGSPAGSPTSTEEGTSTEPSEGSAPGTSTEPSEGSAPGTSESATPESGPGTSTEPSEGSAPGTSESATPESGPGSEPATSGSETPGTSTEPSEGSAPGTSTEPSEGSAPGTSESATPESGPGTSESATPESGPGSPAGSPTSTEEGTSESATPESGPGSEPATSGSETPGTSESATPESGPGTSTEPSEGSAPGTSTEPSEGSAPGTSTEPSEGSAPGTSTEPSEGSAPGTSTEPSEGSAPGTSTEPSEGSAPGSPAGSPTSTEEGTSTEPSEGSAPGTSESATPESGPGSEPATSGSETPGTSESATPESGPGSEPATSGSETPGTSESATPESGPGTSTEPSEGSAPGTSESATPESGPGSPAGSPTSTEEGSPAGSPTSTEEGSPAGSPTSTEEGTSESATPESGPGTSTEPSEGSAPGDPSKKQGPWLEEEEEAYGWMDF

SEQ ID NO: 1745 - protein, 628 aa, Artificial Sequence
  Description of Artificial Sequence: Synthetic polypeptide
DYMGWMDFGGSPAGSPTSTEEGTSESATPESGPGTSTEPSEGSAPGSPAGSPTSTEEGTSTEPSEGSAPGTSTEPSEGSAPGTSESATPESGPGSEPATSGSETPGSEPATSGSETPGSPAGSPTSTEEGTSESATPESGPGTSTEPSEGSAPGTSTEPSEGSAPGSPAGSPTSTEEGTSTEPSEGSAPGTSTEPSEGSAPGTSESATPESGPGTSTEPSEGSAPGTSESATPESGPGSEPATSGSETPGTSTEPSEGSAPGTSTEPSEGSAPGTSESATPESGPGTSESATPESGPGSPAGSPTSTEEGTSESATPESGPGSEPATSGSETPGTSESATPESGPGTSTEPSEGSAPGTSTEPSEGSAPGTSTEPSEGSAPGTSTEPSEGSAPGTSTEPSEGSAPGTSTEPSEGSAPGSPAGSPTSTEEGTSTEPSEGSAPGTSESATPESGPGSEPATSGSETPGTSESATPESGPGSEPATSGSETPGTSESATPESGPGTSTEPSEGSAPGTSESATPESGPGSPAGSPTSTEEGSPAGSPTSTEEGSPAGSPTSTEEGTSESATPESGPGTSTEPSEGSAPGYAEGTFISDYSIAMDKIHQQDFVNWLLAQKGKKNDWKHNITQ

SEQ ID NO: 1746 - protein, 615 aa, Artificial Sequence
  Description of Artificial Sequence: Synthetic polypeptide
DYMGWMDFGGSPAGSPTSTEEGTSESATPESGPGTSTEPSEGSAPGSPAGSPTSTEEGTSTEPSEGSAPGTSTEPSEGSAPGTSESATPESGPGSEPATSGSETPGSEPATSGSETPGSPAGSPTSTEEGTSESATPESGPGTSTEPSEGSAPGTSTEPSEGSAPGSPAGSPTSTEEGTSTEPSEGSAPGTSTEPSEGSAPGTSESATPESGPGTSTEPSEGSAPGTSESATPESGPGSEPATSGSETPGTSTEPSEGSAPGTSTEPSEGSAPGTSESATPESGPGTSESATPESGPGSPAGSPTSTEEGTSESATPESGPGSEPATSGSETPGTSESATPESGPGTSTEPSEGSAPGTSTEPSEGSAPGTSTEPSEGSAPGTSTEPSEGSAPGTSTEPSEGSAPGTSTEPSEGSAPGSPAGSPTSTEEGTSTEPSEGSAPGTSESATPESGPGSEPATSGSETPGTSESATPESGPGSEPATSGSETPGTSESATPESGPGTSTEPSEGSAPGTSESATPESGPGSPAGSPTSTEEGSPAGSPTSTEEGSPAGSPTSTEEGTSESATPESGPGTSTEPSEGSAPGHSQGTFTSDYSKYLDSRRAQDFVQWLMNT

SEQ ID NO: 1747 - protein, 623 aa, Artificial Sequence
  Description of Artificial Sequence: Synthetic polypeptide
DYMGWMDFGGSPAGSPTSTEEGTSESATPESGPGTSTEPSEGSAPGSPAGSPTSTEEGTSTEPSEGSAPGTSTEPSEGSAPGTSESATPESGPGSEPATSGSETPGSEPATSGSETPGSPAGSPTSTEEGTSESATPESGPGTSTEPSEGSAPGTSTEPSEGSAPGSPAGSPTSTEEGTSTEPSEGSAPGTSTEPSEGSAPGTSESATPESGPGTSTEPSEGSAPGTSESATPESGPGSEPATSGSETPGTSTEPSEGSAPGTSTEPSEGSAPGTSESATPESGPGTSESATPESGPGSPAGSPTSTEEGTSESATPESGPGSEPATSGSETPGTSESATPESGPGTSTEPSEGSAPGTSTEPSEGSAPGTSTEPSEGSAPGTSTEPSEGSAPGTSTEPSEGSAPGTSTEPSEGSAPGSPAGSPTSTEEGTSTEPSEGSAPGTSESATPESGPGSEPATSGSETPGTSESATPESGPGSEPATSGSETPGTSESATPESGPGTSTEPSEGSAPGTSESATPESGPGSPAGSPTSTEEGSPAGSPTSTEEGSPAGSPTSTEEGTSESATPESGPGTSTEPSEGSAPGHDEFERHAEGTFTSDVSSTLEGQAALEFIAWLVKGRG

SEQ ID NO: 1748 - protein, 616 aa, Artificial Sequence
  Description of Artificial Sequence: Synthetic polypeptide
DYMGWMDFGGSPAGSPTSTEEGTSESATPESGPGTSTEPSEGSAPGSPAGSPTSTEEGTSTEPSEGSAPGTSTEPSEGSAPGTSESATPESGPGSEPATSGSETPGSEPATSGSETPGSPAGSPTSTEEGTSESATPESGPGTSTEPSEGSAPGTSTEPSEGSAPGSPAGSPTSTEEGTSTEPSEGSAPGTSTEPSEGSAPGTSESATPESGPGTSTEPSEGSAPGTSESATPESGPGSEPATSGSETPGTSTEPSEGSAPGTSTEPSEGSAPGTSESATPESGPGTSESATPESGPGSPAGSPTSTEEGTSESATPESGPGSEPATSGSETPGTSESATPESGPGTSTEPSEGSAPGTSTEPSEGSAPGTSTEPSEGSAPGTSTEPSEGSAPGTSTEPSEGSAPGTSTEPSEGSAPGSPAGSPTSTEEGTSTEPSEGSAPGTSESATPESGPGSEPATSGSETPGTSESATPESGPGSEPATSGSETPGTSESATPESGPGTSTEPSEGSAPGTSESATPESGPGSPAGSPTSTEEGSPAGSPTSTEEGSPAGSPTSTEEGTSESATPESGPGTSTEPSEGSAPGHAEGTFTSDVSSYLEGQAALEFIAWLVKGR

SEQ ID NO: 1749 - protein, 619 aa, Artificial Sequence
  Description of Artificial Sequence: Synthetic polypeptide
DYMGWMDFGGSPAGSPTSTEEGTSESATPESGPGTSTEPSEGSAPGSPAGSPTSTEEGTSTEPSEGSAPGTSTEPSEGSAPGTSESATPESGPGSEPATSGSETPGSEPATSGSETPGSPAGSPTSTEEGTSESATPESGPGTSTEPSEGSAPGTSTEPSEGSAPGSPAGSPTSTEEGTSTEPSEGSAPGTSTEPSEGSAPGTSESATPESGPGTSTEPSEGSAPGTSESATPESGPGSEPATSGSETPGTSTEPSEGSAPGTSTEPSEGSAPGTSESATPESGPGTSESATPESGPGSPAGSPTSTEEGTSESATPESGPGSEPATSGSETPGTSESATPESGPGTSTEPSEGSAPGTSTEPSEGSAPGTSTEPSEGSAPGTSTEPSEGSAPGTSTEPSEGSAPGTSTEPSEGSAPGSPAGSPTSTEEGTSTEPSEGSAPGTSESATPESGPGSEPATSGSETPGTSESATPESGPGSEPATSGSETPGTSESATPESGPGTSTEPSEGSAPGTSESATPESGPGSPAGSPTSTEEGSPAGSPTSTEEGSPAGSPTSTEEGTSESATPESGPGTSTEPSEGSAPGHADGSFSDEMNTILDNLAARDFINWLIETKITD

SEQ ID NO: 1750 - protein, 656 aa, Artificial Sequence
  Description of Artificial Sequence: Synthetic polypeptide
DYMGWMDFGGSPAGSPTSTEEGTSESATPESGPGTSTEPSEGSAPGSPAGSPTSTEEGTSTEPSEGSAPGTSTEPSEGSAPGTSESATPESGPGSEPATSGSETPGSEPATSGSETPGSPAGSPTSTEEGTSESATPESGPGTSTEPSEGSAPGTSTEPSEGSAPGSPAGSPTSTEEGTSTEPSEGSAPGTSTEPSEGSAPGTSESATPESGPGTSTEPSEGSAPGTSESATPESGPGSEPATSGSETPGTSTEPSEGSAPGTSTEPSEGSAPGTSESATPESGPGTSESATPESGPGSPAGSPTSTEEGTSESATPESGPGSEPATSGSETPGTSESATPESGPGTSTEPSEGSAPGTSTEPSEGSAPGTSTEPSEGSAPGTSTEPSEGSAPGTSTEPSEGSAPGTSTEPSEGSAPGSPAGSPTSTEEGTSTEPSEGSAPGTSESATPESGPGSEPATSGSETPGTSESATPESGPGSEPATSGSETPGTSESATPESGPGTSTEPSEGSAPGTSESATPESGPGSPAGSPTSTEEGSPAGSPTSTEEGSPAGSPTSTEEGTSESATPESGPGTSTEPSEGSAPGGPETLCGAELVDALQFVCGDRGFYFNKPTGYGSSSRRAPQTGIVDECCFRSCDLRRLEMYCAPLKPAKSA

SEQ ID NO: 1751 - protein, 653 aa, Artificial Sequence
  Description of Artificial Sequence: Synthetic polypeptide
DYMGWMDFGGSPAGSPTSTEEGTSESATPESGPGTSTEPSEGSAPGSPAGSPTSTEEGTSTEPSEGSAPGTSTEPSEGSAPGTSESATPESGPGSEPATSGSETPGSEPATSGSETPGSPAGSPTSTEEGTSESATPESGPGTSTEPSEGSAPGTSTEPSEGSAPGSPAGSPTSTEEGTSTEPSEGSAPGTSTEPSEGSAPGTSESATPESGPGTSTEPSEGSAPGTSESATPESGPGSEPATSGSETPGTSTEPSEGSAPGTSTEPSEGSAPGTSESATPESGPGTSESATPESGPGSPAGSPTSTEEGTSESATPESGPGSEPATSGSETPGTSESATPESGPGTSTEPSEGSAPGTSTEPSEGSAPGTSTEPSEGSAPGTSTEPSEGSAPGTSTEPSEGSAPGTSTEPSEGSAPGSPAGSPTSTEEGTSTEPSEGSAPGTSESATPESGPGSEPATSGSETPGTSESATPESGPGSEPATSGSETPGTSESATPESGPGTSTEPSEGSAPGTSESATPESGPGSPAGSPTSTEEGSPAGSPTSTEEGSPAGSPTSTEEGTSESATPESGPGTSTEPSEGSAPGAYRPSETLCGGELVDTLQFVCGDRGFYFSRPASRVSRRSRGIVEECCFRSCDLALLETYCATPAKSE

SEQ ID NO: 1752 - protein, 735 aa, Artificial Sequence
  Description of Artificial Sequence: Synthetic polypeptide
DYMGWMDFGGSPAGSPTSTEEGTSESATPESGPGTSTEPSEGSAPGSPAGSPTSTEEGTSTEPSEGSAPGTSTEPSEGSAPGTSESATPESGPGSEPATSGSETPGSEPATSGSETPGSPAGSPTSTEEGTSESATPESGPGTSTEPSEGSAPGTSTEPSEGSAPGSPAGSPTSTEEGTSTEPSEGSAPGTSTEPSEGSAPGTSESATPESGPGTSTEPSEGSAPGTSESATPESGPGSEPATSGSETPGTSTEPSEGSAPGTSTEPSEGSAPGTSESATPESGPGTSESATPESGPGSPAGSPTSTEEGTSESATPESGPGSEPATSGSETPGTSESATPESGPGTSTEPSEGSAPGTSTEPSEGSAPGTSTEPSEGSAPGTSTEPSEGSAPGTSTEPSEGSAPGTSTEPSEGSAPGSPAGSPTSTEEGTSTEPSEGSAPGTSESATPESGPGSEPATSGSETPGTSESATPESGPGSEPATSGSETPGTSESATPESGPGTSTEPSEGSAPGTSESATPESGPGSPAGSPTSTEEGSPAGSPTSTEEGSPAGSPTSTEEGTSESATPESGPGTSTEPSEGSAPGEESQKKLPSSRITCPQGSVAYGSYCYSLILIPQTWSNAELSCQMHFSGHLAFLLSTGEITFVSSLVKNSLTAYQYIWIGLHDPSHGTLPNGSGWKWSSSNVLTFYNWERNPSIAADRGYCAVLSQKSGFQKWRDFNCENELPYICKFKV

SEQ ID NO: 1753 - protein, 633 aa, Artificial Sequence
  Description of Artificial Sequence: Synthetic polypeptide
DYMGWMDFGGSPAGSPTSTEEGTSESATPESGPGTSTEPSEGSAPGSPAGSPTSTEEGTSTEPSEGSAPGTSTEPSEGSAPGTSESATPESGPGSEPATSGSETPGSEPATSGSETPGSPAGSPTSTEEGTSESATPESGPGTSTEPSEGSAPGTSTEPSEGSAPGSPAGSPTSTEEGTSTEPSEGSAPGTSTEPSEGSAPGTSESATPESGPGTSTEPSEGSAPGTSESATPESGPGSEPATSGSETPGTSTEPSEGSAPGTSTEPSEGSAPGTSESATPESGPGTSESATPESGPGSPAGSPTSTEEGTSESATPESGPGSEPATSGSETPGTSESATPESGPGTSTEPSEGSAPGTSTEPSEGSAPGTSTEPSEGSAPGTSTEPSEGSAPGTSTEPSEGSAPGTSTEPSEGSAPGSPAGSPTSTEEGTSTEPSEGSAPGTSESATPESGPGSEPATSGSETPGTSESATPESGPGSEPATSGSETPGTSESATPESGPGTSTEPSEGSAPGTSESATPESGPGSPAGSPTSTEEGSPAGSPTSTEEGSPAGSPTSTEEGTSESATPESGPGTSTEPSEGSAPGTQAQLLRVGCVLGTCQVQNLSHRLWQLMGPAGRQDSAPVDPSSPHSY

SEQ ID NO: 1754 - protein, 732 aa, Artificial Sequence
  Description of Artificial Sequence: Synthetic polypeptide
DYMGWMDFGGSPAGSPTSTEEGTSESATPESGPGTSTEPSEGSAPGSPAGSPTSTEEGTSTEPSEGSAPGTSTEPSEGSAPGTSESATPESGPGSEPATSGSETPGSEPATSGSETPGSPAGSPTSTEEGTSESATPESGPGTSTEPSEGSAPGTSTEPSEGSAPGSPAGSPTSTEEGTSTEPSEGSAPGTSTEPSEGSAPGTSESATPESGPGTSTEPSEGSAPGTSESATPESGPGSEPATSGSETPGTSTEPSEGSAPGTSTEPSEGSAPGTSESATPESGPGTSESATPESGPGSPAGSPTSTEEGTSESATPESGPGSEPATSGSETPGTSESATPESGPGTSTEPSEGSAPGTSTEPSEGSAPGTSTEPSEGSAPGTSTEPSEGSAPGTSTEPSEGSAPGTSTEPSEGSAPGSPAGSPTSTEEGTSTEPSEGSAPGTSESATPESGPGSEPATSGSETPGTSESATPESGPGSEPATSGSETPGTSESATPESGPGTSTEPSEGSAPGTSESATPESGPGSPAGSPTSTEEGSPAGSPTSTEEGSPAGSPTSTEEGTSESATPESGPGTSTEPSEGSAPGVPIQKVQDDTKTLIKTIVTRINDISHTQSVSSKQKVTGLDFIPGLHPILTLSKMDQTLAVYQQILTSMPSRNVIQISNDLENLRDLLHVLAFSKSCHLPWASGLETLDSLGGVLEASGYSTEVVALSRLQGSLQDMLWQLDLSPGC

SEQ ID NO: 1755 - protein, 611 aa, Artificial Sequence
  Description of Artificial Sequence: Synthetic polypeptide
DYMGWMDFGGSPAGSPTSTEEGTSESATPESGPGTSTEPSEGSAPGSPAGSPTSTEEGTSTEPSEGSAPGTSTEPSEGSAPGTSESATPESGPGSEPATSGSETPGSEPATSGSETPGSPAGSPTSTEEGTSESATPESGPGTSTEPSEGSAPGTSTEPSEGSAPGSPAGSPTSTEEGTSTEPSEGSAPGTSTEPSEGSAPGTSESATPESGPGTSTEPSEGSAPGTSESATPESGPGSEPATSGSETPGTSTEPSEGSAPGTSTEPSEGSAPGTSESATPESGPGTSESATPESGPGSPAGSPTSTEEGTSESATPESGPGSEPATSGSETPGTSESATPESGPGTSTEPSEGSAPGTSTEPSEGSAPGTSTEPSEGSAPGTSTEPSEGSAPGTSTEPSEGSAPGTSTEPSEGSAPGSPAGSPTSTEEGTSTEPSEGSAPGTSESATPESGPGSEPATSGSETPGTSESATPESGPGSEPATSGSETPGTSESATPESGPGTSTEPSEGSAPGTSESATPESGPGSPAGSPTSTEEGSPAGSPTSTEEGSPAGSPTSTEEGTSESATPESGPGTSTEPSEGSAPGFRVDEEFQSPFASQSRGYFLFRPRN

SEQ ID NO: 1756 - protein, 623 aa, Artificial Sequence
  Description of Artificial Sequence: Synthetic polypeptide
DYMGWMDFGGSPAGSPTSTEEGTSESATPESGPGTSTEPSEGSAPGSPAGSPTSTEEGTSTEPSEGSAPGTSTEPSEGSAPGTSESATPESGPGSEPATSGSETPGSEPATSGSETPGSPAGSPTSTEEGTSESATPESGPGTSTEPSEGSAPGTSTEPSEGSAPGSPAGSPTSTEEGTSTEPSEGSAPGTSTEPSEGSAPGTSESATPESGPGTSTEPSEGSAPGTSESATPESGPGSEPATSGSETPGTSTEPSEGSAPGTSTEPSEGSAPGTSESATPESGPGTSESATPESGPGSPAGSPTSTEEGTSESATPESGPGSEPATSGSETPGTSESATPESGPGTSTEPSEGSAPGTSTEPSEGSAPGTSTEPSEGSAPGTSTEPSEGSAPGTSTEPSEGSAPGTSTEPSEGSAPGSPAGSPTSTEEGTSTEPSEGSAPGTSESATPESGPGSEPATSGSETPGTSESATPESGPGSEPATSGSETPGTSESATPESGPGTSTEPSEGSAPGTSESATPESGPGSPAGSPTSTEEGSPAGSPTSTEEGSPAGSPTSTEEGTSESATPESGPGTSTEPSEGSAPGHSQGTFTSDYSKYLDSRRAQDFVQWLMNTKRNRNNIA

SEQ ID NO: 1757 - protein, 623 aa, Artificial Sequence
  Description of Artificial Sequence: Synthetic polypeptide
DYMGWMDFGGSPAGSPTSTEEGTSESATPESGPGTSTEPSEGSAPGSPAGSPTSTEEGTSTEPSEGSAPGTSTEPSEGSAPGTSESATPESGPGSEPATSGSETPGSEPATSGSETPGSPAGSPTSTEEGTSESATPESGPGTSTEPSEGSAPGTSTEPSEGSAPGSPAGSPTSTEEGTSTEPSEGSAPGTSTEPSEGSAPGTSESATPESGPGTSTEPSEGSAPGTSESATPESGPGSEPATSGSETPGTSTEPSEGSAPGTSTEPSEGSAPGTSESATPESGPGTSESATPESGPGSPAGSPTSTEEGTSESATPESGPGSEPATSGSETPGTSESATPESGPGTSTEPSEGSAPGTSTEPSEGSAPGTSTEPSEGSAPGTSTEPSEGSAPGTSTEPSEGSAPGTSTEPSEGSAPGSPAGSPTSTEEGTSTEPSEGSAPGTSESATPESGPGSEPATSGSETPGTSESATPESGPGSEPATSGSETPGTSESATPESGPGTSTEPSEGSAPGTSESATPESGPGSPAGSPTSTEEGSPAGSPTSTEEGSPAGSPTSTEEGTSESATPESGPGTSTEPSEGSAPGKCNTATCATNRLANFLVHSSNNFGPILPPTNVGSNTY

SEQ ID NO: 1758 - protein, 622 aa, Artificial Sequence
  Description of Artificial Sequence: Synthetic polypeptide
DYMGWMDFGGSPAGSPTSTEEGTSESATPESGPGTSTEPSEGSAPGSPAGSPTSTEEGTSTEPSEGSAPGTSTEPSEGSAPGTSESATPESGPGSEPATSGSETPGSEPATSGSETPGSPAGSPTSTEEGTSESATPESGPGTSTEPSEGSAPGTSTEPSEGSAPGSPAGSPTSTEEGTSTEPSEGSAPGTSTEPSEGSAPGTSESATPESGPGTSTEPSEGSAPGTSESATPESGPGSEPATSGSETPGTSTEPSEGSAPGTSTEPSEGSAPGTSESATPESGPGTSESATPESGPGSPAGSPTSTEEGTSESATPESGPGSEPATSGSETPGTSESATPESGPGTSTEPSEGSAPGTSTEPSEGSAPGTSTEPSEGSAPGTSTEPSEGSAPGTSTEPSEGSAPGTSTEPSEGSAPGSPAGSPTSTEEGTSTEPSEGSAPGTSESATPESGPGSEPATSGSETPGTSESATPESGPGSEPATSGSETPGTSESATPESGPGTSTEPSEGSAPGTSESATPESGPGSPAGSPTSTEEGSPAGSPTSTEEGSPAGSPTSTEEGTSESATPESGPGTSTEPSEGSAPGYPIKPEAPGEDASPEELNRYYASLRHYLNLVTRQRY

SEQ ID NO: 1759 - protein, 627 aa, Artificial Sequence
  Description of Artificial Sequence: Synthetic polypeptide
DYMGWMDFGGSPAGSPTSTEEGTSESATPESGPGTSTEPSEGSAPGSPAGSPTSTEEGTSTEPSEGSAPGTSTEPSEGSAPGTSESATPESGPGSEPATSGSETPGSEPATSGSETPGSPAGSPTSTEEGTSESATPESGPGTSTEPSEGSAPGTSTEPSEGSAPGSPAGSPTSTEEGTSTEPSEGSAPGTSTEPSEGSAPGTSESATPESGPGTSTEPSEGSAPGTSESATPESGPGSEPATSGSETPGTSTEPSEGSAPGTSTEPSEGSAPGTSESATPESGPGTSESATPESGPGSPAGSPTSTEEGTSESATPESGPGSEPATSGSETPGTSESATPESGPGTSTEPSEGSAPGTSTEPSEGSAPGTSTEPSEGSAPGTSTEPSEGSAPGTSTEPSEGSAPGTSTEPSEGSAPGSPAGSPTSTEEGTSTEPSEGSAPGTSESATPESGPGSEPATSGSETPGTSESATPESGPGSEPATSGSETPGTSESATPESGPGTSTEPSEGSAPGTSESATPESGPGSPAGSPTSTEEGSPAGSPTSTEEGSPAGSPTSTEEGTSESATPESGPGTSTEPSEGSAPGIVLSLDVPIGLLQILLEQARARAAREQATTNARILARVGHC

SEQ ID NO: 1760 - protein, 624 aa, Artificial Sequence
  Description of Artificial Sequence: Synthetic polypeptide
DYMGWMDFGGSPAGSPTSTEEGTSESATPESGPGTSTEPSEGSAPGSPAGSPTSTEEGTSTEPSEGSAPGTSTEPSEGSAPGTSESATPESGPGSEPATSGSETPGSEPATSGSETPGSPAGSPTSTEEGTSESATPESGPGTSTEPSEGSAPGTSTEPSEGSAPGSPAGSPTSTEEGTSTEPSEGSAPGTSTEPSEGSAPGTSESATPESGPGTSTEPSEGSAPGTSESATPESGPGSEPATSGSETPGTSTEPSEGSAPGTSTEPSEGSAPGTSESATPESGPGTSESATPESGPGSPAGSPTSTEEGTSESATPESGPGSEPATSGSETPGTSESATPESGPGTSTEPSEGSAPGTSTEPSEGSAPGTSTEPSEGSAPGTSTEPSEGSAPGTSTEPSEGSAPGTSTEPSEGSAPGSPAGSPTSTEEGTSTEPSEGSAPGTSESATPESGPGSEPATSGSETPGTSESATPESGPGSEPATSGSETPGTSESATPESGPGTSTEPSEGSAPGTSESATPESGPGSPAGSPTSTEEGSPAGSPTSTEEGSPAGSPTSTEEGTSESATPESGPGTSTEPSEGSAPGFTLSLDVPTNIMNLLFNIAKAKNLRAQAAANAHLMAQI

SEQ ID NO: 1761 - protein, 654 aa, Artificial Sequence
  Description of Artificial Sequence: Synthetic polypeptide
HSDGTFTSDLSKQMEEEAVRLFIEWLKNGGPSSGAPPPSGGSPAGSPTSTEEGTSESATPESGPGTSTEPSEGSAPGSPAGSPTSTEEGTSTEPSEGSAPGTSTEPSEGSAPGTSESATPESGPGSEPATSGSETPGSEPATSGSETPGSPAGSPTSTEEGTSESATPESGPGTSTEPSEGSAPGTSTEPSEGSAPGSPAGSPTSTEEGTSTEPSEGSAPGTSTEPSEGSAPGTSESATPESGPGTSTEPSEGSAPGTSESATPESGPGSEPATSGSETPGTSTEPSEGSAPGTSTEPSEGSAPGTSESATPESGPGTSESATPESGPGSPAGSPTSTEEGTSESATPESGPGSEPATSGSETPGTSESATPESGPGTSTEPSEGSAPGTSTEPSEGSAPGTSTEPSEGSAPGTSTEPSEGSAPGTSTEPSEGSAPGTSTEPSEGSAPGSPAGSPTSTEEGTSTEPSEGSAPGTSESATPESGPGSEPATSGSETPGTSESATPESGPGSEPATSGSETPGTSESATPESGPGTSTEPSEGSAPGTSESATPESGPGSPAGSPTSTEEGSPAGSPTSTEEGSPAGSPTSTEEGTSESATPESGPGTSTEPSEGSAPGKCNTATCATNRLANFLVHSSNNFGPILPPTNVGSNTY

SEQ ID NO: 1762 - protein, 654 aa, Artificial Sequence
  Description of Artificial Sequence: Synthetic polypeptide
HGEGTFTSDLSKQMEEEAVRLFIEWLKNGGPSSGAPPPSGGSPAGSPTSTEEGTSESATPESGPGTSTEPSEGSAPGSPAGSPTSTEEGTSTEPSEGSAPGTSTEPSEGSAPGTSESATPESGPGSEPATSGSETPGSEPATSGSETPGSPAGSPTSTEEGTSESATPESGPGTSTEPSEGSAPGTSTEPSEGSAPGSPAGSPTSTEEGTSTEPSEGSAPGTSTEPSEGSAPGTSESATPESGPGTSTEPSEGSAPGTSESATPESGPGSEPATSGSETPGTSTEPSEGSAPGTSTEPSEGSAPGTSESATPESGPGTSESATPESGPGSPAGSPTSTEEGTSESATPESGPGSEPATSGSETPGTSESATPESGPGTSTEPSEGSAPGTSTEPSEGSAPGTSTEPSEGSAPGTSTEPSEGSAPGTSTEPSEGSAPGTSTEPSEGSAPGSPAGSPTSTEEGTSTEPSEGSAPGTSESATPESGPGSEPATSGSETPGTSESATPESGPGSEPATSGSETPGTSESATPESGPGTSTEPSEGSAPGTSESATPESGPGSPAGSPTSTEEGSPAGSPTSTEEGSPAGSPTSTEEGTSESATPESGPGTSTEPSEGSAPGKCNTATCATNRLANFLVHSSNNFGPILPPTNVGSNTY

SEQ ID NO: 1763 - protein, 831 aa, Artificial Sequence
  Description of Artificial Sequence: Synthetic polypeptide
MRSGCVVVHVWILAGLWLAVAGRPLAFSDAGPHVHYGWGDPIRLRHLYTSGPHGLSSCFLRIRADGVVDCARGQSAHSLLEIKAVALRTVAIKGVHSVRYLCMGADGKMQGLLQYSEEDCAFEEEIRPDGYNVYRSEKHRLPVSLSSAKQRQLYKNRGFLPLSHFLPMLPMVPEEPEDLRGHLESDMFSSPLETDSMDPFGLVTGLEAVRSPSFEKGGSPAGSPTSTEEGTSESATPESGPGTSTEPSEGSAPGSPAGSPTSTEEGTSTEPSEGSAPGTSTEPSEGSAPGTSESATPESGPGSEPATSGSETPGSEPATSGSETPGSPAGSPTSTEEGTSESATPESGPGTSTEPSEGSAPGTSTEPSEGSAPGSPAGSPTSTEEGTSTEPSEGSAPGTSTEPSEGSAPGTSESATPESGPGTSTEPSEGSAPGTSESATPESGPGSEPATSGSETPGTSTEPSEGSAPGTSTEPSEGSAPGTSESATPESGPGTSESATPESGPGSPAGSPTSTEEGTSESATPESGPGSEPATSGSETPGTSESATPESGPGTSTEPSEGSAPGTSTEPSEGSAPGTSTEPSEGSAPGTSTEPSEGSAPGTSTEPSEGSAPGTSTEPSEGSAPGSPAGSPTSTEEGTSTEPSEGSAPGTSESATPESGPGSEPATSGSETPGTSESATPESGPGSEPATSGSETPGTSESATPESGPGTSTEPSEGSAPGTSESATPESGPGSPAGSPTSTEEGSPAGSPTSTEEGSPAGSPTSTEEGTSESATPESGPGTSTEPSEGSAPGKCNTATCATNRLANFLVHSSNNFGPILPPTNVGSNTY

SEQ ID NO: 1764 - protein, 824 aa, Artificial Sequence
  Description of Artificial Sequence: Synthetic polypeptide
MDSDETGFEHSGLWVSVLAGLLLGACQAHPIPDSSPLLQFGGQVRQRYLYTDDAQQTEAHLEIREDGTVGGAADQSPESLLQLKALKPGVIQILGVKTSRFLCQRPDGALYGSLHFDPEACSFRELLLEDGYNVYQSEAHGLPLHLPGNKSPHRDPAPRGPARFLPLPGLPPALPEPPGILAPQPPDVGSSDPLSMVGPSQGRSPSYASGGSPAGSPTSTEEGTSESATPESGPGTSTEPSEGSAPGSPAGSPTSTEEGTSTEPSEGSAPGTSTEPSEGSAPGTSESATPESGPGSEPATSGSETPGSEPATSGSETPGSPAGSPTSTEEGTSESATPESGPGTSTEPSEGSAPGTSTEPSEGSAPGSPAGSPTSTEEGTSTEPSEGSAPGTSTEPSEGSAPGTSESATPESGPGTSTEPSEGSAPGTSESATPESGPGSEPATSGSETPGTSTEPSEGSAPGTSTEPSEGSAPGTSESATPESGPGTSESATPESGPGSPAGSPTSTEEGTSESATPESGPGSEPATSGSETPGTSESATPESGPGTSTEPSEGSAPGTSTEPSEGSAPGTSTEPSEGSAPGTSTEPSEGSAPGTSTEPSEGSAPGTSTEPSEGSAPGSPAGSPTSTEEGTSTEPSEGSAPGTSESATPESGPGSEPATSGSETPGTSESATPESGPGSEPATSGSETPGTSESATPESGPGTSTEPSEGSAPGTSESATPESGPGSPAGSPTSTEEGSPAGSPTSTEEGSPAGSPTSTEEGTSESATPESGPGTSTEPSEGSAPGKCNTATCATNRLANFLVHSSNNFGPILPPTNVGSNTY

SEQ ID NO: 1765 - protein, 649 aa, Artificial Sequence
  Description of Artificial Sequence: Synthetic polypeptide
QLGPQGPPHLVADPSKKQGPWLEEEEEAYGWMDFGGSPAGSPTSTEEGTSESATPESGPGTSTEPSEGSAPGSPAGSPTSTEEGTSTEPSEGSAPGTSTEPSEGSAPGTSESATPESGPGSEPATSGSETPGSEPATSGSETPGSPAGSPTSTEEGTSESATPESGPGTSTEPSEGSAPGTSTEPSEGSAPGSPAGSPTSTEEGTSTEPSEGSAPGTSTEPSEGSAPGTSESATPESGPGTSTEPSEGSAPGTSESATPESGPGSEPATSGSETPGTSTEPSEGSAPGTSTEPSEGSAPGTSESATPESGPGTSESATPESGPGSPAGSPTSTEEGTSESATPESGPGSEPATSGSETPGTSESATPESGPGTSTEPSEGSAPGTSTEPSEGSAPGTSTEPSEGSAPGTSTEPSEGSAPGTSTEPSEGSAPGTSTEPSEGSAPGSPAGSPTSTEEGTSTEPSEGSAPGTSESATPESGPGSEPATSGSETPGTSESATPESGPGSEPATSGSETPGTSESATPESGPGTSTEPSEGSAPGTSESATPESGPGSPAGSPTSTEEGSPAGSPTSTEEGSPAGSPTSTEEGTSESATPESGPGTSTEPSEGSAPGKCNTATCATNRLANFLVHSSNNFGPILPPTNVGSNTY

SEQ ID NO: 1766 - protein, 637 aa, Artificial Sequence
  Description of Artificial Sequence: Synthetic polypeptide
DPSKKQGPWLEEEEEAYGWMDFGGSPAGSPTSTEEGTSESATPESGPGTSTEPSEGSAPGSPAGSPTSTEEGTSTEPSEGSAPGTSTEPSEGSAPGTSESATPESGPGSEPATSGSETPGSEPATSGSETPGSPAGSPTSTEEGTSESATPESGPGTSTEPSEGSAPGTSTEPSEGSAPGSPAGSPTSTEEGTSTEPSEGSAPGTSTEPSEGSAPGTSESATPESGPGTSTEPSEGSAPGTSESATPESGPGSEPATSGSETPGTSTEPSEGSAPGTSTEPSEGSAPGTSESATPESGPGTSESATPESGPGSPAGSPTSTEEGTSESATPESGPGSEPATSGSETPGTSESATPESGPGTSTEPSEGSAPGTSTEPSEGSAPGTSTEPSEGSAPGTSTEPSEGSAPGTSTEPSEGSAPGTSTEPSEGSAPGSPAGSPTSTEEGTSTEPSEGSAPGTSESATPESGPGSEPATSGSETPGTSESATPESGPGSEPATSGSETPGTSESATPESGPGTSTEPSEGSAPGTSESATPESGPGSPAGSPTSTEEGSPAGSPTSTEEGSPAGSPTSTEEGTSESATPESGPGTSTEPSEGSAPGKCNTATCATNRLANFLVHSSNNFGPILPPTNVGSNTY

SEQ ID NO: 1767 - protein, 657 aa, Artificial Sequence
  Description of Artificial Sequence: Synthetic polypeptide
YAEGTFISDYSIAMDKIHQQDFVNWLLAQKGKKNDWKHNITQGGSPAGSPTSTEEGTSESATPESGPGTSTEPSEGSAPGSPAGSPTSTEEGTSTEPSEGSAPGTSTEPSEGSAPGTSESATPESGPGSEPATSGSETPGSEPATSGSETPGSPAGSPTSTEEGTSESATPESGPGTSTEPSEGSAPGTSTEPSEGSAPGSPAGSPTSTEEGTSTEPSEGSAPGTSTEPSEGSAPGTSESATPESGPGTSTEPSEGSAPGTSESATPESGPGSEPATSGSETPGTSTEPSEGSAPGTSTEPSEGSAPGTSESATPESGPGTSESATPESGPGSPAGSPTSTEEGTSESATPESGPGSEPATSGSETPGTSESATPESGPGTSTEPSEGSAPGTSTEPSEGSAPGTSTEPSEGSAPGTSTEPSEGSAPGTSTEPSEGSAPGTSTEPSEGSAPGSPAGSPTSTEEGTSTEPSEGSAPGTSESATPESGPGSEPATSGSETPGTSESATPESGPGSEPATSGSETPGTSESATPESGPGTSTEPSEGSAPGTSESATPESGPGSPAGSPTSTEEGSPAGSPTSTEEGSPAGSPTSTEEGTSESATPESGPGTSTEPSEGSAPGKCNTATCATNRLANFLVHSSNNFGPILPPTNVGSNTY

SEQ ID NO: 1768 - protein, 644 aa, Artificial Sequence
  Description of Artificial Sequence: Synthetic polypeptide
HSQGTFTSDYSKYLDSRRAQDFVQWLMNTGGSPAGSPTSTEEGTSESATPESGPGTSTEPSEGSAPGSPAGSPTSTEEGTSTEPSEGSAPGTSTEPSEGSAPGTSESATPESGPGSEPATSGSETPGSEPATSGSETPGSPAGSPTSTEEGTSESATPESGPGTSTEPSEGSAPGTSTEPSEGSAPGSPAGSPTSTEEGTSTEPSEGSAPGTSTEPSEGSAPGTSESATPESGPGTSTEPSEGSAPGTSESATPESGPGSEPATSGSETPGTSTEPSEGSAPGTSTEPSEGSAPGTSESATPESGPGTSESATPESGPGSPAGSPTSTEEGTSESATPESGPGSEPATSGSETPGTSESATPESGPGTSTEPSEGSAPGTSTEPSEGSAPGTSTEPSEGSAPGTSTEPSEGSAPGTSTEPSEGSAPGTSTEPSEGSAPGSPAGSPTSTEEGTSTEPSEGSAPGTSESATPESGPGSEPATSGSETPGTSESATPESGPGSEPATSGSETPGTSESATPESGPGTSTEPSEGSAPGTSESATPESGPGSPAGSPTSTEEGSPAGSPTSTEEGSPAGSPTSTEEGTSESATPESGPGTSTEPSEGSAPGKCNTATCATNRLANFLVHSSNNFGPILPPTNVGSNTY

SEQ ID NO: 1769 - protein, 652 aa, Artificial Sequence
  Description of Artificial Sequence: Synthetic polypeptide
HDEFERHAEGTFTSDVSSTLEGQAALEFIAWLVKGRGGGSPAGSPTSTEEGTSESATPESGPGTSTEPSEGSAPGSPAGSPTSTEEGTSTEPSEGSAPGTSTEPSEGSAPGTSESATPESGPGSEPATSGSETPGSEPATSGSETPGSPAGSPTSTEEGTSESATPESGPGTSTEPSEGSAPGTSTEPSEGSAPGSPAGSPTSTEEGTSTEPSEGSAPGTSTEPSEGSAPGTSESATPESGPGTSTEPSEGSAPGTSESATPESGPGSEPATSGSETPGTSTEPSEGSAPGTSTEPSEGSAPGTSESATPESGPGTSESATPESGPGSPAGSPTSTEEGTSESATPESGPGSEPATSGSETPGTSESATPESGPGTSTEPSEGSAPGTSTEPSEGSAPGTSTEPSEGSAPGTSTEPSEGSAPGTSTEPSEGSAPGTSTEPSEGSAPGSPAGSPTSTEEGTSTEPSEGSAPGTSESATPESGPGSEPATSGSETPGTSESATPESGPGSEPATSGSETPGTSESATPESGPGTSTEPSEGSAPGTSESATPESGPGSPAGSPTSTEEGSPAGSPTSTEEGSPAGSPTSTEEGTSESATPESGPGTSTEPSEGSAPGKCNTATCATQRLANFLVHSSNNFGAILSSTNVGSNTY

SEQ ID NO: 1770 - protein, 645 aa, Artificial Sequence
  Description of Artificial Sequence: Synthetic polypeptide
HAEGTFTSDVSSYLEGQAALEFIAWLVKGRGGSPAGSPTSTEEGTSESATPESGPGTSTEPSEGSAPGSPAGSPTSTEEGTSTEPSEGSAPGTSTEPSEGSAPGTSESATPESGPGSEPATSGSETPGSEPATSGSETPGSPAGSPTSTEEGTSESATPESGPGTSTEPSEGSAPGTSTEPSEGSAPGSPAGSPTSTEEGTSTEPSEGSAPGTSTEPSEGSAPGTSESATPESGPGTSTEPSEGSAPGTSESATPESGPGSEPATSGSETPGTSTEPSEGSAPGTSTEPSEGSAPGTSESATPESGPGTSESATPESGPGSPAGSPTSTEEGTSESATPESGPGSEPATSGSETPGTSESATPESGPGTSTEPSEGSAPGTSTEPSEGSAPGTSTEPSEGSAPGTSTEPSEGSAPGTSTEPSEGSAPGTSTEPSEGSAPGSPAGSPTSTEEGTSTEPSEGSAPGTSESATPESGPGSEPATSGSETPGTSESATPESGPGSEPATSGSETPGTSESATPESGPGTSTEPSEGSAPGTSESATPESGPGSPAGSPTSTEEGSPAGSPTSTEEGSPAGSPTSTEEGTSESATPESGPGTSTEPSEGSAPGKCNTATCATQRLANFLVHSSNNFGAILSSTNVGSNTY

SEQ ID NO: 1771 - protein, 648 aa, Artificial Sequence
  Description of Artificial Sequence: Synthetic polypeptide
HADGSFSDEMNTILDNLAARDFINWLIETKITDGGSPAGSPTSTEEGTSESATPESGPGTSTEPSEGSAPGSPAGSPTSTEEGTSTEPSEGSAPGTSTEPSEGSAPGTSESATPESGPGSEPATSGSETPGSEPATSGSETPGSPAGSPTSTEEGTSESATPESGPGTSTEPSEGSAPGTSTEPSEGSAPGSPAGSPTSTEEGTSTEPSEGSAPGTSTEPSEGSAPGTSESATPESGPGTSTEPSEGSAPGTSESATPESGPGSEPATSGSETPGTSTEPSEGSAPGTSTEPSEGSAPGTSESATPESGPGTSESATPESGPGSPAGSPTSTEEGTSESATPESGPGSEPATSGSETPGTSESATPESGPGTSTEPSEGSAPGTSTEPSEGSAPGTSTEPSEGSAPGTSTEPSEGSAPGTSTEPSEGSAPGTSTEPSEGSAPGSPAGSPTSTEEGTSTEPSEGSAPGTSESATPESGPGSEPATSGSETPGTSESATPESGPGSEPATSGSETPGTSESATPESGPGTSTEPSEGSAPGTSESATPESGPGSPAGSPTSTEEGSPAGSPTSTEEGSPAGSPTSTEEGTSESATPESGPGTSTEPSEGSAPGKCNTATCATQRLANFLVHSSNNFGAILSSTNVGSNTY

SEQ ID NO: 1772 - protein, 685 aa, Artificial Sequence
  Description of Artificial Sequence: Synthetic polypeptide
GPETLCGAELVDALQFVCGDRGFYFNKPTGYGSSSRRAPQTGIVDECCFRSCDLRRLEMYCAPLKPAKSAGGSPAGSPTSTEEGTSESATPESGPGTSTEPSEGSAPGSPAGSPTSTEEGTSTEPSEGSAPGTSTEPSEGSAPGTSESATPESGPGSEPATSGSETPGSEPATSGSETPGSPAGSPTSTEEGTSESATPESGPGTSTEPSEGSAPGTSTEPSEGSAPGSPAGSPTSTEEGTSTEPSEGSAPGTSTEPSEGSAPGTSESATPESGPGTSTEPSEGSAPGTSESATPESGPGSEPATSGSETPGTSTEPSEGSAPGTSTEPSEGSAPGTSESATPESGPGTSESATPESGPGSPAGSPTSTEEGTSESATPESGPGSEPATSGSETPGTSESATPESGPGTSTEPSEGSAPGTSTEPSEGSAPGTSTEPSEGSAPGTSTEPSEGSAPGTSTEPSEGSAPGTSTEPSEGSAPGSPAGSPTSTEEGTSTEPSEGSAPGTSESATPESGPGSEPATSGSETPGTSESATPESGPGSEPATSGSETPGTSESATPESGPGTSTEPSEGSAPGTSESATPESGPGSPAGSPTSTEEGSPAGSPTSTEEGSPAGSPTSTEEGTSESATPESGPGTSTEPSEGSAPGKCNTATCATQRLANFLVHSSNNFGAILSSTNVGSNTY

SEQ ID NO: 1773 - protein, 682 aa, Artificial Sequence
  Description of Artificial Sequence: Synthetic polypeptide
AYRPSETLCGGELVDTLQFVCGDRGFYFSRPASRVSRRSRGIVEECCFRSCDLALLETYCATPAKSEGGSPAGSPTSTEEGTSESATPESGPGTSTEPSEGSAPGSPAGSPTSTEEGTSTEPSEGSAPGTSTEPSEGSAPGTSESATPESGPGSEPATSGSETPGSEPATSGSETPGSPAGSPTSTEEGTSESATPESGPGTSTEPSEGSAPGTSTEPSEGSAPGSPAGSPTSTEEGTSTEPSEGSAPGTSTEPSEGSAPGTSESATPESGPGTSTEPSEGSAPGTSESATPESGPGSEPATSGSETPGTSTEPSEGSAPGTSTEPSEGSAPGTSESATPESGPGTSESATPESGPGSPAGSPTSTEEGTSESATPESGPGSEPATSGSETPGTSESATPESGPGTSTEPSEGSAPGTSTEPSEGSAPGTSTEPSEGSAPGTSTEPSEGSAPGTSTEPSEGSAPGTSTEPSEGSAPGSPAGSPTSTEEGTSTEPSEGSAPGTSESATPESGPGSEPATSGSETPGTSESATPESGPGSEPATSGSETPGTSESATPESGPGTSTEPSEGSAPGTSESATPESGPGSPAGSPTSTEEGSPAGSPTSTEEGSPAGSPTSTEEGTSESATPESGPGTSTEPSEGSAPGKCNTATCATQRLANFLVHSSNNFGAILSSTNVGSNTY

SEQ ID NO: 1774 - protein, 764 aa, Artificial Sequence
  Description of Artificial Sequence: Synthetic polypeptide
EESQKKLPSSRITCPQGSVAYGSYCYSLILIPQTWSNAELSCQMHFSGHLAFLLSTGEITFVSSLVKNSLTAYQYIWIGLHDPSHGTLPNGSGWKWSSSNVLTFYNWERNPSIAADRGYCAVLSQKSGFQKWRDFNCENELPYICKFKVGGSPAGSPTSTEEGTSESATPESGPGTSTEPSEGSAPGSPAGSPTSTEEGTSTEPSEGSAPGTSTEPSEGSAPGTSESATPESGPGSEPATSGSETPGSEPATSGSETPGSPAGSPTSTEEGTSESATPESGPGTSTEPSEGSAPGTSTEPSEGSAPGSPAGSPTSTEEGTSTEPSEGSAPGTSTEPSEGSAPGTSESATPESGPGTSTEPSEGSAPGTSESATPESGPGSEPATSGSETPGTSTEPSEGSAPGTSTEPSEGSAPGTSESATPESGPGTSESATPESGPGSPAGSPTSTEEGTSESATPESGPGSEPATSGSETPGTSESATPESGPGTSTEPSEGSAPGTSTEPSEGSAPGTSTEPSEGSAPGTSTEPSEGSAPGTSTEPSEGSAPGTSTEPSEGSAPGSPAGSPTSTEEGTSTEPSEGSAPGTSESATPESGPGSEPATSGSETPGTSESATPESGPGSEPATSGSETPGTSESATPESGPGTSTEPSEGSAPGTSESATPESGPGSPAGSPTSTEEGSPAGSPTSTEEGSPAGSPTSTEEGTSESATPESGPGTSTEPSEGSAPGKCNTATCATQRLANFLVHSSNNFGAILSSTNVGSNTY

SEQ ID NO: 1775 - protein, 662 aa, Artificial Sequence
  Description of Artificial Sequence: Synthetic polypeptide
TQAQLLRVGCVLGTCQVQNLSHRLWQLMGPAGRQDSAPVDPSSPHSYGGSPAGSPTSTEEGTSESATPESGPGTSTEPSEGSAPGSPAGSPTSTEEGTSTEPSEGSAPGTSTEPSEGSAPGTSESATPESGPGSEPATSGSETPGSEPATSGSETPGSPAGSPTSTEEGTSESATPESGPGTSTEPSEGSAPGTSTEPSEGSAPGSPAGSPTSTEEGTSTEPSEGSAPGTSTEPSEGSAPGTSESATPESGPGTSTEPSEGSAPGTSESATPESGPGSEPATSGSETPGTSTEPSEGSAPGTSTEPSEGSAPGTSESATPESGPGTSESATPESGPGSPAGSPTSTEEGTSESATPESGPGSEPATSGSETPGTSESATPESGPGTSTEPSEGSAPGTSTEPSEGSAPGTSTEPSEGSAPGTSTEPSEGSAPGTSTEPSEGSAPGTSTEPSEGSAPGSPAGSPTSTEEGTSTEPSEGSAPGTSESATPESGPGSEPATSGSETPGTSESATPESGPGSEPATSGSETPGTSESATPESGPGTSTEPSEGSAPGTSESATPESGPGSPAGSPTSTEEGSPAGSPTSTEEGSPAGSPTSTEEGTSESATPESGPGTSTEPSEGSAPGKCNTATCATQRLANFLVHSSNNFGAILSSTNVGSNTY

SEQ ID NO: 1776 - protein, 761 aa, Artificial Sequence
  Description of Artificial Sequence: Synthetic polypeptide
VPIQKVQDDTKTLIKTIVTRINDISHTQSVSSKQKVTGLDFIPGLHPILTLSKMDQTLAVYQQILTSMPSRNVIQISNDLENLRDLLHVLAFSKSCHLPWASGLETLDSLGGVLEASGYSTEVVALSRLQGSLQDMLWQLDLSPGCGGSPAGSPTSTEEGTSESATPESGPGTSTEPSEGSAPGSPAGSPTSTEEGTSTEPSEGSAPGTSTEPSEGSAPGTSESATPESGPGSEPATSGSETPGSEPATSGSETPGSPAGSPTSTEEGTSESATPESGPGTSTEPSEGSAPGTSTEPSEGSAPGSPAGSPTSTEEGTSTEPSEGSAPGTSTEPSEGSAPGTSESATPESGPGTSTEPSEGSAPGTSESATPESGPGSEPATSGSETPGTSTEPSEGSAPGTSTEPSEGSAPGTSESATPESGPGTSESATPESGPGSPAGSPTSTEEGTSESATPESGPGSEPATSGSETPGTSESATPESGPGTSTEPSEGSAPGTSTEPSEGSAPGTSTEPSEGSAPGTSTEPSEGSAPGTSTEPSEGSAPGTSTEPSEGSAPGSPAGSPTSTEEGTSTEPSEGSAPGTSESATPESGPGSEPATSGSETPGTSESATPESGPGSEPATSGSETPGTSESATPESGPGTSTEPSEGSAPGTSESATPESGPGSPAGSPTSTEEGSPAGSPTSTEEGSPAGSPTSTEEGTSESATPESGPGTSTEPSEGSAPGKCNTATCATQRLANFLVHSSNNFGAILSSTNVGSNTY

SEQ ID NO: 1777 - protein, 640 aa, Artificial Sequence
  Description of Artificial Sequence: Synthetic polypeptide
FRVDEEFQSPFASQSRGYFLFRPRNGGSPAGSPTSTEEGTSESATPESGPGTSTEPSEGSAPGSPAGSPTSTEEGTSTEPSEGSAPGTSTEPSEGSAPGTSESATPESGPGSEPATSGSETPGSEPATSGSETPGSPAGSPTSTEEGTSESATPESGPGTSTEPSEGSAPGTSTEPSEGSAPGSPAGSPTSTEEGTSTEPSEGSAPGTSTEPSEGSAPGTSESATPESGPGTSTEPSEGSAPGTSESATPESGPGSEPATSGSETPGTSTEPSEGSAPGTSTEPSEGSAPGTSESATPESGPGTSESATPESGPGSPAGSPTSTEEGTSESATPESGPGSEPATSGSETPGTSESATPESGPGTSTEPSEGSAPGTSTEPSEGSAPGTSTEPSEGSAPGTSTEPSEGSAPGTSTEPSEGSAPGTSTEPSEGSAPGSPAGSPTSTEEGTSTEPSEGSAPGTSESATPESGPGSEPATSGSETPGTSESATPESGPGSEPATSGSETPGTSESATPESGPGTSTEPSEGSAPGTSESATPESGPGSPAGSPTSTEEGSPAGSPTSTEEGSPAGSPTSTEEGTSESATPESGPGTSTEPSEGSAPGKCNTATCATQRLANFLVHSSNNFGAILSSTNVGSNTY

SEQ ID NO: 1778 - protein, 652 aa, Artificial Sequence
  Description of Artificial Sequence: Synthetic polypeptide
HSQGTFTSDYSKYLDSRRAQDFVQWLMNTKRNRNNIAGGSPAGSPTSTEEGTSESATPESGPGTSTEPSEGSAPGSPAGSPTSTEEGTSTEPSEGSAPGTSTEPSEGSAPGTSESATPESGPGSEPATSGSETPGSEPATSGSETPGSPAGSPTSTEEGTSESATPESGPGTSTEPSEGSAPGTSTEPSEGSAPGSPAGSPTSTEEGTSTEPSEGSAPGTSTEPSEGSAPGTSESATPESGPGTSTEPSEGSAPGTSESATPESGPGSEPATSGSETPGTSTEPSEGSAPGTSTEPSEGSAPGTSESATPESGPGTSESATPESGPGSPAGSPTSTEEGTSESATPESGPGSEPATSGSETPGTSESATPESGPGTSTEPSEGSAPGTSTEPSEGSAPGTSTEPSEGSAPGTSTEPSEGSAPGTSTEPSEGSAPGTSTEPSEGSAPGSPAGSPTSTEEGTSTEPSEGSAPGTSESATPESGPGSEPATSGSETPGTSESATPESGPGSEPATSGSETPGTSESATPESGPGTSTEPSEGSAPGTSESATPESGPGSPAGSPTSTEEGSPAGSPTSTEEGSPAGSPTSTEEGTSESATPESGPGTSTEPSEGSAPGKCNTATCATQRLANFLVHSSNNFGAILSSTNVGSNTY

SEQ ID NO: 1779 - protein, 652 aa, Artificial Sequence
  Description of Artificial Sequence: Synthetic polypeptide
KCNTATCATNRLANFLVHSSNNFGPILPPTNVGSNTYGGSPAGSPTSTEEGTSESATPESGPGTSTEPSEGSAPGSPAGSPTSTEEGTSTEPSEGSAPGTSTEPSEGSAPGTSESATPESGPGSEPATSGSETPGSEPATSGSETPGSPAGSPTSTEEGTSESATPESGPGTSTEPSEGSAPGTSTEPSEGSAPGSPAGSPTSTEEGTSTEPSEGSAPGTSTEPSEGSAPGTSESATPESGPGTSTEPSEGSAPGTSESATPESGPGSEPATSGSETPGTSTEPSEGSAPGTSTEPSEGSAPGTSESATPESGPGTSESATPESGPGSPAGSPTSTEEGTSESATPESGPGSEPATSGSETPGTSESATPESGPGTSTEPSEGSAPGTSTEPSEGSAPGTSTEPSEGSAPGTSTEPSEGSAPGTSTEPSEGSAPGTSTEPSEGSAPGSPAGSPTSTEEGTSTEPSEGSAPGTSESATPESGPGSEPATSGSETPGTSESATPESGPGSEPATSGSETPGTSESATPESGPGTSTEPSEGSAPGTSESATPESGPGSPAGSPTSTEEGSPAGSPTSTEEGSPAGSPTSTEEGTSESATPESGPGTSTEPSEGSAPGKCNTATCATQRLANFLVHSSNNFGAILSSTNVGSNTY

SEQ ID NO: 1780 - protein, 647 aa, Artificial Sequence; identical to SEQ ID NO: 1736
  Description of Artificial Sequence: Synthetic polypeptide

SEQ ID NO: 1781 - protein, 652 aa, Artificial Sequence; identical to SEQ ID NO: 1737
  Description of Artificial Sequence: Synthetic polypeptide

SEQ ID NO: 1782 - protein, 649 aa, Artificial Sequence; identical to SEQ ID NO: 1738
  Description of Artificial Sequence: Synthetic polypeptide

SEQ ID NO: 1783 - protein, 656 aa, Artificial Sequence
  Description of Artificial Sequence: Synthetic polypeptide
HSDGTFTSDLSKQMEEEAVRLFIEWLKNGGPSSGAPPPSGGSPAGSPTSTEEGTSESATPESGPGTSTEPSEGSAPGSPAGSPTSTEEGTSTEPSEGSAPGTSTEPSEGSAPGTSESATPESGPGSEPATSGSETPGSEPATSGSETPGSPAGSPTSTEEGTSESATPESGPGTSTEPSEGSAPGTSTEPSEGSAPGSPAGSPTSTEEGTSTEPSEGSAPGTSTEPSEGSAPGTSESATPESGPGTSTEPSEGSAPGTSESATPESGPGSEPATSGSETPGTSTEPSEGSAPGTSTEPSEGSAPGTSESATPESGPGTSESATPESGPGSPAGSPTSTEEGTSESATPESGPGSEPATSGSETPGTSESATPESGPGTSTEPSEGSAPGTSTEPSEGSAPGTSTEPSEGSAPGTSTEPSEGSAPGTSTEPSEGSAPGTSTEPSEGSAPGSPAGSPTSTEEGTSTEPSEGSAPGTSESATPESGPGSEPATSGSETPGTSESATPESGPGSEPATSGSETPGTSESATPESGPGTSTEPSEGSAPGTSESATPESGPGSPAGSPTSTEEGSPAGSPTSTEEGSPAGSPTSTEEGTSESATPESGPGTSTEPSEGSAPGHGEGTFTSDLSKQMEEEAVRLFIEWLKNGGPSSGAPPPS

SEQ ID NO: 1784 - protein, 833 aa, Artificial Sequence
  Description of Artificial Sequence: Synthetic polypeptide
HSDGTFTSDLSKQMEEEAVRLFIEWLKNGGPSSGAPPPSGGSPAGSPTSTEEGTSESATPESGPGTSTEPSEGSAPGSPAGSPTSTEEGTSTEPSEGSAPGTSTEPSEGSAPGTSESATPESGPGSEPATSGSETPGSEPATSGSETPGSPAGSPTSTEEGTSESATPESGPGTSTEPSEGSAPGTSTEPSEGSAPGSPAGSPTSTEEGTSTEPSEGSAPGTSTEPSEGSAPGTSESATPESGPGTSTEPSEGSAPGTSESATPESGPGSEPATSGSETPGTSTEPSEGSAPGTSTEPSEGSAPGTSESATPESGPGTSESATPESGPGSPAGSPTSTEEGTSESATPESGPGSEPATSGSETPGTSESATPESGPGTSTEPSEGSAPGTSTEPSEGSAPGTSTEPSEGSAPGTSTEPSEGSAPGTSTEPSEGSAPGTSTEPSEGSAPGSPAGSPTSTEEGTSTEPSEGSAPGTSESATPESGPGSEPATSGSETPGTSESATPESGPGSEPATSGSETPGTSESATPESGPGTSTEPSEGSAPGTSESATPESGPGSPAGSPTSTEEGSPAGSPTSTEEGSPAGSPTSTEEGTSESATPESGPGTSTEPSEGSAPGMRSGCVVVHVWILAGLWLAVAGRPLAFSDAGPHVHYGWGDPIRLRHLYTSGPHGLSSCFLRIRADGVVDCARGQSAHSLLEIKAVALRTVAIKGVHSVRYLCMGADGKMQGLLQYSEEDCAFEEEIRPDGYNVYRSEKHRLPVSLSSAKQRQLYKNRGFLPLSHFLPMLPMVPEEPEDLRGHLESDMFSSPLETDSMDPFGLVTGLEAVRSPSFEK

SEQ ID NO: 1785 - protein, 826 aa, Artificial Sequence
  Description of Artificial Sequence: Synthetic polypeptide
HSDGTFTSDLSKQMEEEAVRLFIEWLKNGGPSSGAPPPSGGSPAGSPTSTEEGTSESATPESGPGTSTEPSEGSAPGSPAGSPTSTEEGTSTEPSEGSAPGTSTEPSEGSAPGTSESATPESGPGSEPATSGSETPGSEPATSGSETPGSPAGSPTSTEEGTSESATPESGPGTSTEPSEGSAPGTSTEPSEGSAPGSPAGSPTSTEEGTSTEPSEGSAPGTSTEPSEGSAPGTSESATPESGPGTSTEPSEGSAPGTSESATPESGPGSEPATSGSETPGTSTEPSEGSAPGTSTEPSEGSAPGTSESATPESGPGTSESATPESGPGSPAGSPTSTEEGTSESATPESGPGSEPATSGSETPGTSESATPESGPGTSTEPSEGSAPGTSTEPSEGSAPGTSTEPSEGSAPGTSTEPSEGSAPGTSTEPSEGSAPGTSTEPSEGSAPGSPAGSPTSTEEGTSTEPSEGSAPGTSESATPESGPGSEPATSGSETPGTSESATPESGPGSEPATSGSETPGTSESATPESGPGTSTEPSEGSAPGTSESATPESGPGSPAGSPTSTEEGSPAGSPTSTEEGSPAGSPTSTEEGTSESATPESGPGTSTEPSEGSAPGMDSDETGFEHSGLWVSVLAGLLLGACQAHPIPDSSPLLQFGGQVRQRYLYTDDAQQTEAHLEIREDGTVGGAADQSPESLLQLKALKPGVIQILGVKTSRFLCQRPDGALYGSLHFDPEACSFRELLLEDGYNVYQSEAHGLPLHLPGNKSPHRDPAPRGPARFLPLPGLPPALPEPPGILAPQPPDVGSSDPLSMVGPSQGRSPSYAS

SEQ ID NO: 1786 - protein, 651 aa, Artificial Sequence
  Description of Artificial Sequence: Synthetic polypeptide
HSDGTFTSDLSKQMEEEAVRLFIEWLKNGGPSSGAPPPSGGSPAGSPTSTEEGTSESATPESGPGTSTEPSEGSAPGSPAGSPTSTEEGTSTEPSEGSAPGTSTEPSEGSAPGTSESATPESGPGSEPATSGSETPGSEPATSGSETPGSPAGSPTSTEEGTSESATPESGPGTSTEPSEGSAPGTSTEPSEGSAPGSPAGSPTSTEEGTSTEPSEGSAPGTSTEPSEGSAPGTSESATPESGPGTSTEPSEGSAPGTSESATPESGPGSEPATSGSETPGTSTEPSEGSAPGTSTEPSEGSAPGTSESATPESGPGTSESATPESGPGSPAGSPTSTEEGTSESATPESGPGSEPATSGSETPGTSESATPESGPGTSTEPSEGSAPGTSTEPSEGSAPGTSTEPSEGSAPGTSTEPSEGSAPGTSTEPSEGSAPGTSTEPSEGSAPGSPAGSPTSTEEGTSTEPSEGSAPGTSESATPESGPGSEPATSGSETPGTSESATPESGPGSEPATSGSETPGTSESATPESGPGTSTEPSEGSAPGTSESATPESGPGSPAGSPTSTEEGSPAGSPTSTEEGSPAGSPTSTEEGTSESATPESGPGTSTEPSEGSAPGQLGPQGPPHLVADPSKKQGPWLEEEEEAYGWMDF

SEQ ID NO: 1787 - protein, 639 aa, Artificial Sequence
  Description of Artificial Sequence: Synthetic polypeptide
HSDGTFTSDLSKQMEEEAVRLFIEWLKNGGPSSGAPPPSGGSPAGSPTSTEEGTSESATPESGPGTSTEPSEGSAPGSPAGSPTSTEEGTSTEPSEGSAPGTSTEPSEGSAPGTSESATPESGPGSEPATSGSETPGSEPATSGSETPGSPAGSPTSTEEGTSESATPESGPGTSTEPSEGSAPGTSTEPSEGSAPGSPAGSPTSTEEGTSTEPSEGSAPGTSTEPSEGSAPGTSESATPESGPGTSTEPSEGSAPGTSESATPESGPGSEPATSGSETPGTSTEPSEGSAPGTSTEPSEGSAPGTSESATPESGPGTSESATPESGPGSPAGSPTSTEEGTSESATPESGPGSEPATSGSETPGTSESATPESGPGTSTEPSEGSAPGTSTEPSEGSAPGTSTEPSEGSAPGTSTEPSEGSAPGTSTEPSEGSAPGTSTEPSEGSAPGSPAGSPTSTEEGTSTEPSEGSAPGTSESATPESGPGSEPATSGSETPGTSESATPESGPGSEPATSGSETPGTSESATPESGPGTSTEPSEGSAPGTSESATPESGPGSPAGSPTSTEEGSPAGSPTSTEEGSPAGSPTSTEEGTSESATPESGPGTSTEPSEGSAPGDPSKKQGPWLEEEEEAYGWMDF

SEQ ID NO: 1788 - protein, 659 aa, Artificial Sequence
  Description of Artificial Sequence: Synthetic polypeptide
HSDGTFTSDLSKQMEEEAVRLFIEWLKNGGPSSGAPPPSGGSPAGSPTSTEEGTSESATPESGPGTSTEPSEGSAPGSPAGSPTSTEEGTSTEPSEGSAPGTSTEPSEGSAPGTSESATPESGPGSEPATSGSETPGSEPATSGSETPGSPAGSPTSTEEGTSESATPESGPGTSTEPSEGSAPGTSTEPSEGSAPGSPAGSPTSTEEGTSTEPSEGSAPGTSTEPSEGSAPGTSESATPESGPGTSTEPSEGSAPGTSESATPESGPGSEPATSGSETPGTSTEPSEGSAPGTSTEPSEGSAPGTSESATPESGPGTSESATPESGPGSPAGSPTSTEEGTSESATPESGPGSEPATSGSETPGTSESATPESGPGTSTEPSEGSAPGTSTEPSEGSAPGTSTEPSEGSAPGTSTEPSEGSAPGTSTEPSEGSAPGTSTEPSEGSAPGSPAGSPTSTEEGTSTEPSEGSAPGTSESATPESGPGSEPATSGSETPGTSESATPESGPGSEPATSGSETPGTSESATPESGPGTSTEPSEGSAPGTSESATPESGPGSPAGSPTSTEEGSPAGSPTSTEEGSPAGSPTSTEEGTSESATPESGPGTSTEPSEGSAPGYAEGTFISDYSIAMDKIHQQDFVNWLLAQKGKKNDWKHNITQ

SEQ ID NO: 1789 - protein, 646 aa, Artificial Sequence
  Description of Artificial Sequence: Synthetic polypeptide
HSDGTFTSDLSKQMEEEAVRLFIEWLKNGGPSSGAPPPSGGSPAGSPTSTEEGTSESATPESGPGTSTEPSEGSAPGSPAGSPTSTEEGTSTEPSEGSAPGTSTEPSEGSAPGTSESATPESGPGSEPATSGSETPGSEPATSGSETPGSPAGSPTSTEEGTSESATPESGPGTSTEPSEGSAPGTSTEPSEGSAPGSPAGSPTSTEEGTSTEPSEGSAPGTSTEPSEGSAPGTSESATPESGPGTSTEPSEGSAPGTSESATPESGPGSEPATSGSETPGTSTEPSEGSAPGTSTEPSEGSAPGTSESATPESGPGTSESATPESGPGSPAGSPTSTEEGTSESATPESGPGSEPATSGSETPGTSESATPESGPGTSTEPSEGSAPGTSTEPSEGSAPGTSTEPSEGSAPGTSTEPSEGSAPGTSTEPSEGSAPGTSTEPSEGSAPGSPAGSPTSTEEGTSTEPSEGSAPGTSESATPESGPGSEPATSGSETPGTSESATPESGPGSEPATSGSETPGTSESATPESGPGTSTEPSEGSAPGTSESATPESGPGSPAGSPTSTEEGSPAGSPTSTEEGSPAGSPTSTEEGTSESATPESGPGTSTEPSEGSAPGHSQGTFTSDYSKYLDSRRAQDFVQWLMNT

SEQ ID NO: 1790 - protein, 654 aa, Artificial Sequence
  Description of Artificial Sequence: Synthetic polypeptide
HSDGTFTSDLSKQMEEEAVRLFIEWLKNGGPSSGAPPPSGGSPAGSPTSTEEGTSESATPESGPGTSTEPSEGSAPGSPAGSPTSTEEGTSTEPSEGSAPGTSTEPSEGSAPGTSESATPESGPGSEPATSGSETPGSEPATSGSETPGSPAGSPTSTEEGTSESATPESGPGTSTEPSEGSAPGTSTEPSEGSAPGSPAGSPTSTEEGTSTEPSEGSAPGTSTEPSEGSAPGTSESATPESGPGTSTEPSEGSAPGTSESATPESGPGSEPATSGSETPGTSTEPSEGSAPGTSTEPSEGSAPGTSESATPESGPGTSESATPESGPGSPAGSPTSTEEGTSESATPESGPGSEPATSGSETPGTSESATPESGPGTSTEPSEGSAPGTSTEPSEGSAPGTSTEPSEGSAPGTSTEPSEGSAPGTSTEPSEGSAPGTSTEPSEGSAPGSPAGSPTSTEEGTSTEPSEGSAPGTSESATPESGPGSEPATSGSETPGTSESATPESGPGSEPATSGSETPGTSESATPESGPGTSTEPSEGSAPGTSESATPESGPGSPAGSPTSTEEGSPAGSPTSTEEGSPAGSPTSTEEGTSESATPESGPGTSTEPSEGSAPGHDEFERHAEGTFTSDVSSTLEGQAALEFIAWLVKGRG

SEQ ID NO: 1791 - protein, 647 aa, Artificial Sequence
  Description of Artificial Sequence: Synthetic polypeptide
HSDGTFTSDLSKQMEEEAVRLFIEWLKNGGPSSGAPPPSGGSPAGSPTSTEEGTSESATPESGPGTSTEPSEGSAPGSPAGSPTSTEEGTSTEPSEGSAPGTSTEPSEGSAPGTSESATPESGPGSEPATSGSETPGSEPATSGSETPGSPAGSPTSTEEGTSESATPESGPGTSTEPSEGSAPGTSTEPSEGSAPGSPAGSPTSTEEGTSTEPSEGSAPGTSTEPSEGSAPGTSESATPESGPGTSTEPSEGSAPGTSESATPESGPGSEPATSGSETPGTSTEPSEGSAPGTSTEPSEGSAPGTSESATPESGPGTSESATPESGPGSPAGSPTSTEEGTSESATPESGPGSEPATSGSETPGTSESATPESGPGTSTEPSEGSAPGTSTEPSEGSAPGTSTEPSEGSAPGTSTEPSEGSAPGTSTEPSEGSAPGTSTEPSEGSAPGSPAGSPTSTEEGTSTEPSEGSAPGTSESATPESGPGSEPATSGSETPGTSESATPESGPGSEPATSGSETPGTSESATPESGPGTSTEPSEGSAPGTSESATPESGPGSPAGSPTSTEEGSPAGSPTSTEEGSPAGSPTSTEEGTSESATPESGPGTSTEPSEGSAPGHAEGTFTSDVSSYLEGQAALEFIAWLVKGR

SEQ ID NO: 1792 - protein, 650 aa, Artificial Sequence
  Description of Artificial Sequence: Synthetic polypeptide
HSDGTFTSDLSKQMEEEAVRLFIEWLKNGGPSSGAPPPSGGSPAGSPTSTEEGTSESATPESGPGTSTEPSEGSAPGSPAGSPTSTEEGTSTEPSEGSAPGTSTEPSEGSAPGTSESATPESGPGSEPATSGSETPGSEPATSGSETPGSPAGSPTSTEEGTSESATPESGPGTSTEPSEGSAPGTSTEPSEGSAPGSPAGSPTSTEEGTSTEPSEGSAPGTSTEPSEGSAPGTSESATPESGPGTSTEPSEGSAPGTSESATPESGPGSEPATSGSETPGTSTEPSEGSAPGTSTEPSEGSAPGTSESATPESGPGTSESATPESGPGSPAGSPTSTEEGTSESATPESGPGSEPATSGSETPGTSESATPESGPGTSTEPSEGSAPGTSTEPSEGSAPGTSTEPSEGSAPGTSTEPSEGSAPGTSTEPSEGSAPGTSTEPSEGSAPGSPAGSPTSTEEGTSTEPSEGSAPGTSESATPESGPGSEPATSGSETPGTSESATPESGPGSEPATSGSETPGTSESATPESGPGTSTEPSEGSAPGTSESATPESGPGSPAGSPTSTEEGSPAGSPTSTEEGSPAGSPTSTEEGTSESATPESGPGTSTEPSEGSAPGHADGSFSDEMNTILDNLAARDFINWLIETKITD

SEQ ID NO: 1793 - protein, 687 aa, Artificial Sequence
  Description of Artificial Sequence: Synthetic polypeptide
HSDGTFTSDLSKQMEEEAVRLFIEWLKNGGPSSGAPPPSGGSPAGSPTSTEEGTSESATPESGPGTSTEPSEGSAPGSPAGSPTSTEEGTSTEPSEGSAPGTSTEPSEGSAPGTSESATPESGPGSEPATSGSETPGSEPATSGSETPGSPAGSPTSTEEGTSESATPESGPGTSTEPSEGSAPGTSTEPSEGSAPGSPAGSPTSTEEGTSTEPSEGSAPGTSTEPSEGSAPGTSESATPESGPGTSTEPSEGSAPGTSESATPESGPGSEPATSGSETPGTSTEPSEGSAPGTSTEPSEGSAPGTSESATPESGPGTSESATPESGPGSPAGSPTSTEEGTSESATPESGPGSEPATSGSETPGTSESATPESGPGTSTEPSEGSAPGTSTEPSEGSAPGTSTEPSEGSAPGTSTEPSEGSAPGTSTEPSEGSAPGTSTEPSEGSAPGSPAGSPTSTEEGTSTEPSEGSAPGTSESATPESGPGSEPATSGSETPGTSESATPESGPGSEPATSGSETPGTSESATPESGPGTSTEPSEGSAPGTSESATPESGPGSPAGSPTSTEEGSPAGSPTSTEEGSPAGSPTSTEEGTSESATPESGPGTSTEPSEGSAPGGPETLCGAELVDALQFVCGDRGFYFNKPTGYGSSSRRAPQTGIVDECCFRSCDLRRLEMYCAPLKPAKSA

SEQ ID NO: 1794 - protein, 684 aa, Artificial Sequence
  Description of Artificial Sequence: Synthetic polypeptide
HSDGTFTSDLSKQMEEEAVRLFIEWLKNGGPSSGAPPPSGGSPAGSPTSTEEGTSESATPESGPGTSTEPSEGSAPGSPAGSPTSTEEGTSTEPSEGSAPGTSTEPSEGSAPGTSESATPESGPGSEPATSGSETPGSEPATSGSETPGSPAGSPTSTEEGTSESATPESGPGTSTEPSEGSAPGTSTEPSEGSAPGSPAGSPTSTEEGTSTEPSEGSAPGTSTEPSEGSAPGTSESATPESGPGTSTEPSEGSAPGTSESATPESGPGSEPATSGSETPGTSTEPSEGSAPGTSTEPSEGSAPGTSESATPESGPGTSESATPESGPGSPAGSPTSTEEGTSESATPESGPGSEPATSGSETPGTSESATPESGPGTSTEPSEGSAPGTSTEPSEGSAPGTSTEPSEGSAPGTSTEPSEGSAPGTSTEPSEGSAPGTSTEPSEGSAPGSPAGSPTSTEEGTSTEPSEGSAPGTSESATPESGPGSEPATSGSETPGTSESATPESGPGSEPATSGSETPGTSESATPESGPGTSTEPSEGSAPGTSESATPESGPGSPAGSPTSTEEGSPAGSPTSTEEGSPAGSPTSTEEGTSESATPESGPGTSTEPSEGSAPGAYRPSETLCGGELVDTLQFVCGDRGFYFSRPASRVSRRSRGIVEECCFRSCDLALLETYCATPAKSE

SEQ ID NO: 1795 - protein, 766 aa, Artificial Sequence
  Description of Artificial Sequence: Synthetic polypeptide
HSDGTFTSDLSKQMEEEAVRLFIEWLKNGGPSSGAPPPSGGSPAGSPTSTEEGTSESATPESGPGTSTEPSEGSAPGSPAGSPTSTEEGTSTEPSEGSAPGTSTEPSEGSAPGTSESATPESGPGSEPATSGSETPGSEPATSGSETPGSPAGSPTSTEEGTSESATPESGPGTSTEPSEGSAPGTSTEPSEGSAPGSPAGSPTSTEEGTSTEPSEGSAPGTSTEPSEGSAPGTSESATPESGPGTSTEPSEGSAPGTSESATPESGPGSEPATSGSETPGTSTEPSEGSAPGTSTEPSEGSAPGTSESATPESGPGTSESATPESGPGSPAGSPTSTEEGTSESATPESGPGSEPATSGSETPGTSESATPESGPGTSTEPSEGSAPGTSTEPSEGSAPGTSTEPSEGSAPGTSTEPSEGSAPGTSTEPSEGSAPGTSTEPSEGSAPGSPAGSPTSTEEGTSTEPSEGSAPGTSESATPESGPGSEPATSGSETPGTSESATPESGPGSEPATSGSETPGTSESATPESGPGTSTEPSEGSAPGTSESATPESGPGSPAGSPTSTEEGSPAGSPTSTEEGSPAGSPTSTEEGTSESATPESGPGTSTEPSEGSAPGEESQKKLPSSRITCPQGSVAYGSYCYSLILIPQTWSNAELSCQMHFSGHLAFLLSTGEITFVSSLVKNSLTAYQYIWIGLHDPSHGTLPNGSGWKWSSSNVLTFYNWERNPSIAADRGYCAVLSQKSGFQKWRDFNCENELPYICKFKV

SEQ ID NO: 1796 - protein, 664 aa, Artificial Sequence
  Description of Artificial Sequence: Synthetic polypeptide
HSDGTFTSDLSKQMEEEAVRLFIEWLKNGGPSSGAPPPSGGSPAGSPTSTEEGTSESATPESGPGTSTEPSEGSAPGSPAGSPTSTEEGTSTEPSEGSAPGTSTEPSEGSAPGTSESATPESGPGSEPATSGSETPGSEPATSGSETPGSPAGSPTSTEEGTSESATPESGPGTSTEPSEGSAPGTSTEPSEGSAPGSPAGSPTSTEEGTSTEPSEGSAPGTSTEPSEGSAPGTSESATPESGPGTSTEPSEGSAPGTSESATPESGPGSEPATSGSETPGTSTEPSEGSAPGTSTEPSEGSAPGTSESATPESGPGTSESATPESGPGSPAGSPTSTEEGTSESATPESGPGSEPATSGSETPGTSESATPESGPGTSTEPSEGSAPGTSTEPSEGSAPGTSTEPSEGSAPGTSTEPSEGSAPGTSTEPSEGSAPGTSTEPSEGSAPGSPAGSPTSTEEGTSTEPSEGSAPGTSESATPESGPGSEPATSGSETPGTSESATPESGPGSEPATSGSETPGTSESATPESGPGTSTEPSEGSAPGTSESATPESGPGSPAGSPTSTEEGSPAGSPTSTEEGSPAGSPTSTEEGTSESATPESGPGTSTEPSEGSAPGTQAQLLRVGCVLGTCQVQNLSHRLWQLMGPAGRQDSAPVDPSSPHSY

SEQ ID NO: 1797 - protein, 763 aa, Artificial Sequence
  Description of Artificial Sequence: Synthetic polypeptide
HSDGTFTSDLSKQMEEEAVRLFIEWLKNGGPSSGAPPPSGGSPAGSPTSTEEGTSESATPESGPGTSTEPSEGSAPGSPAGSPTSTEEGTSTEPSEGSAPGTSTEPSEGSAPGTSESATPESGPGSEPATSGSETPGSEPATSGSETPGSPAGSPTSTEEGTSESATPESGPGTSTEPSEGSAPGTSTEPSEGSAPGSPAGSPTSTEEGTSTEPSEGSAPGTSTEPSEGSAPGTSESATPESGPGTSTEPSEGSAPGTSESATPESGPGSEPATSGSETPGTSTEPSEGSAPGTSTEPSEGSAPGTSESATPESGPGTSESATPESGPGSPAGSPTSTEEGTSESATPESGPGSEPATSGSETPGTSESATPESGPGTSTEPSEGSAPGTSTEPSEGSAPGTSTEPSEGSAPGTSTEPSEGSAPGTSTEPSEGSAPGTSTEPSEGSAPGSPAGSPTSTEEGTSTEPSEGSAPGTSESATPESGPGSEPATSGSETPGTSESATPESGPGSEPATSGSETPGTSESATPESGPGTSTEPSEGSAPGTSESATPESGPGSPAGSPTSTEEGSPAGSPTSTEEGSPAGSPTSTEEGTSESATPESGPGTSTEPSEGSAPGVPIQKVQDDTKTLIKTIVTRINDISHTQSVSSKQKVTGLDFIPGLHPILTLSKMDQTLAVYQQILTSMPSRNVIQISNDLENLRDLLHVLAFSKSCHLPWASGLETLDSLGGVLEASGYSTEVVALSRLQGSLQDMLWQLDLSPGC

SEQ ID NO: 1798 - protein, 642 aa, Artificial Sequence
  Description of Artificial Sequence: Synthetic polypeptide
HSDGTFTSDLSKQMEEEAVRLFIEWLKNGGPSSGAPPPSGGSPAGSPTSTEEGTSESATPESGPGTSTEPSEGSAPGSPAGSPTSTEEGTSTEPSEGSAPGTSTEPSEGSAPGTSESATPESGPGSEPATSGSETPGSEPATSGSETPGSPAGSPTSTEEGTSESATPESGPGTSTEPSEGSAPGTSTEPSEGSAPGSPAGSPTSTEEGTSTEPSEGSAPGTSTEPSEGSAPGTSESATPESGPGTSTEPSEGSAPGTSESATPESGPGSEPATSGSETPGTSTEPSEGSAPGTSTEPSEGSAPGTSESATPESGPGTSESATPESGPGSPAGSPTSTEEGTSESATPESGPGSEPATSGSETPGTSESATPESGPGTSTEPSEGSAPGTSTEPSEGSAPGTSTEPSEGSAPGTSTEPSEGSAPGTSTEPSEGSAPGTSTEPSEGSAPGSPAGSPTSTEEGTSTEPSEGSAPGTSESATPESGPGSEPATSGSETPGTSESATPESGPGSEPATSGSETPGTSESATPESGPGTSTEPSEGSAPGTSESATPESGPGSPAGSPTSTEEGSPAGSPTSTEEGSPAGSPTSTEEGTSESATPESGPGTSTEPSEGSAPGFRVDEEFQSPFASQSRGYFLFRPRN

SEQ ID NO: 1799 - protein, 654 aa, Artificial Sequence
  Description of Artificial Sequence: Synthetic polypeptide
HSDGTFTSDLSKQMEEEAVRLFIEWLKNGGPSSGAPPPSGGSPAGSPTSTEEGTSESATPESGPGTSTEPSEGSAPGSPAGSPTSTEEGTSTEPSEGSAPGTSTEPSEGSAPGTSESATPESGPGSEPATSGSETPGSEPATSGSETPGSPAGSPTSTEEGTSESATPESGPGTSTEPSEGSAPGTSTEPSEGSAPGSPAGSPTSTEEGTSTEPSEGSAPGTSTEPSEGSAPGTSESATPESGPGTSTEPSEGSAPGTSESATPESGPGSEPATSGSETPGTSTEPSEGSAPGTSTEPSEGSAPGTSESATPESGPGTSESATPESGPGSPAGSPTSTEEGTSESATPESGPGSEPATSGSETPGTSESATPESGPGTSTEPSEGSAPGTSTEPSEGSAPGTSTEPSEGSAPGTSTEPSEGSAPGTSTEPSEGSAPGTSTEPSEGSAPGSPAGSPTSTEEGTSTEPSEGSAPGTSESATPESGPGSEPATSGSETPGTSESATPESGPGSEPATSGSETPGTSESATPESGPGTSTEPSEGSAPGTSESATPESGPGSPAGSPTSTEEGSPAGSPTSTEEGSPAGSPTSTEEGTSESATPESGPGTSTEPSEGSAPGHSQGTFTSDYSKYLDSRRAQDFVQWLMNTKRNRNNIA

SEQ ID NO: 1800 - protein, 654 aa, Artificial Sequence; identical to SEQ ID NO: 1761
  Description of Artificial Sequence: Synthetic polypeptide

SEQ ID NO: 1801 - protein, 653 aa, Artificial Sequence
  Description of Artificial Sequence: Synthetic polypeptide
HSDGTFTSDLSKQMEEEAVRLFIEWLKNGGPSSGAPPPSGGSPAGSPTSTEEGTSESATPESGPGTSTEPSEGSAPGSPAGSPTSTEEGTSTEPSEGSAPGTSTEPSEGSAPGTSESATPESGPGSEPATSGSETPGSEPATSGSETPGSPAGSPTSTEEGTSESATPESGPGTSTEPSEGSAPGTSTEPSEGSAPGSPAGSPTSTEEGTSTEPSEGSAPGTSTEPSEGSAPGTSESATPESGPGTSTEPSEGSAPGTSESATPESGPGSEPATSGSETPGTSTEPSEGSAPGTSTEPSEGSAPGTSESATPESGPGTSESATPESGPGSPAGSPTSTEEGTSESATPESGPGSEPATSGSETPGTSESATPESGPGTSTEPSEGSAPGTSTEPSEGSAPGTSTEPSEGSAPGTSTEPSEGSAPGTSTEPSEGSAPGTSTEPSEGSAPGSPAGSPTSTEEGTSTEPSEGSAPGTSESATPESGPGSEPATSGSETPGTSESATPESGPGSEPATSGSETPGTSESATPESGPGTSTEPSEGSAPGTSESATPESGPGSPAGSPTSTEEGSPAGSPTSTEEGSPAGSPTSTEEGTSESATPESGPGTSTEPSEGSAPGYPIKPEAPGEDASPEELNRYYASLRHYLNLVTRQRY

SEQ ID NO: 1802 - protein, 658 aa, Artificial Sequence
  Description of Artificial Sequence: Synthetic polypeptide
HSDGTFTSDLSKQMEEEAVRLFIEWLKNGGPSSGAPPPSGGSPAGSPTSTEEGTSESATPESGPGTSTEPSEGSAPGSPAGSPTSTEEGTSTEPSEGSAPGTSTEPSEGSAPGTSESATPESGPGSEPATSGSETPGSEPATSGSETPGSPAGSPTSTEEGTSESATPESGPGTSTEPSEGSAPGTSTEPSEGSAPGSPAGSPTSTEEGTSTEPSEGSAPGTSTEPSEGSAPGTSESATPESGPGTSTEPSEGSAPGTSESATPESGPGSEPATSGSETPGTSTEPSEGSAPGTSTEPSEGSAPGTSESATPESGPGTSESATPESGPGSPAGSPTSTEEGTSESATPESGPGSEPATSGSETPGTSESATPESGPGTSTEPSEGSAPGTSTEPSEGSAPGTSTEPSEGSAPGTSTEPSEGSAPGTSTEPSEGSAPGTSTEPSEGSAPGSPAGSPTSTEEGTSTEPSEGSAPGTSESATPESGPGSEPATSGSETPGTSESATPESGPGSEPATSGSETPGTSESATPESGPGTSTEPSEGSAPGTSESATPESGPGSPAGSPTSTEEGSPAGSPTSTEEGSPAGSPTSTEEGTSESATPESGPGTSTEPSEGSAPGIVLSLDVPIGLLQILLEQARARAAREQATTNARILARVGHC

SEQ ID NO: 1803 - protein, 655 aa, Artificial Sequence
  Description of Artificial Sequence: Synthetic polypeptide
HSDGTFTSDLSKQMEEEAVRLFIEWLKNGGPSSGAPPPSGGSPAGSPTSTEEGTSESATPESGPGTSTEPSEGSAPGSPAGSPTSTEEGTSTEPSEGSAPGTSTEPSEGSAPGTSESATPESGPGSEPATSGSETPGSEPATSGSETPGSPAGSPTSTEEGTSESATPESGPGTSTEPSEGSAPGTSTEPSEGSAPGSPAGSPTSTEEGTSTEPSEGSAPGTSTEPSEGSAPGTSESATPESGPGTSTEPSEGSAPGTSESATPESGPGSEPATSGSETPGTSTEPSEGSAPGTSTEPSEGSAPGTSESATPESGPGTSESATPESGPGSPAGSPTSTEEGTSESATPESGPGSEPATSGSETPGTSESATPESGPGTSTEPSEGSAPGTSTEPSEGSAPGTSTEPSEGSAPGTSTEPSEGSAPGTSTEPSEGSAPGTSTEPSEGSAPGSPAGSPTSTEEGTSTEPSEGSAPGTSESATPESGPGSEPATSGSETPGTSESATPESGPGSEPATSGSETPGTSESATPESGPGTSTEPSEGSAPGTSESATPESGPGSPAGSPTSTEEGSPAGSPTSTEEGSPAGSPTSTEEGTSESATPESGPGTSTEPSEGSAPGFTLSLDVPTNIMNLLFNIAKAKNLRAQAAANAHLMAQI

SEQ ID NO: 1804 - protein, 656 aa, Artificial Sequence
  Description of Artificial Sequence: Synthetic polypeptide
HGEGTFTSDLSKQMEEEAVRLFIEWLKNGGPSSGAPPPSGGSPAGSPTSTEEGTSESATPESGPGTSTEPSEGSAPGSPAGSPTSTEEGTSTEPSEGSAPGTSTEPSEGSAPGTSESATPESGPGSEPATSGSETPGSEPATSGSETPGSPAGSPTSTEEGTSESATPESGPGTSTEPSEGSAPGTSTEPSEGSAPGSPAGSPTSTEEGTSTEPSEGSAPGTSTEPSEGSAPGTSESATPESGPGTSTEPSEGSAPGTSESATPESGPGSEPATSGSETPGTSTEPSEGSAPGTSTEPSEGSAPGTSESATPESGPGTSESATPESGPGSPAGSPTSTEEGTSESATPESGPGSEPATSGSETPGTSESATPESGPGTSTEPSEGSAPGTSTEPSEGSAPGTSTEPSEGSAPGTSTEPSEGSAPGTSTEPSEGSAPGTSTEPSEGSAPGSPAGSPTSTEEGTSTEPSEGSAPGTSESATPESGPGSEPATSGSETPGTSESATPESGPGSEPATSGSETPGTSESATPESGPGTSTEPSEGSAPGTSESATPESGPGSPAGSPTSTEEGSPAGSPTSTEEGSPAGSPTSTEEGTSESATPESGPGTSTEPSEGSAPGHSDGTFTSDLSKQMEEEAVRLFIEWLKNGGPSSGAPPPS

SEQ ID NO: 1805 - protein, 833 aa, Artificial Sequence
  Description of Artificial Sequence: Synthetic polypeptide
MRSGCVVVHVWILAGLWLAVAGRPLAFSDAGPHVHYGWGDPIRLRHLYTSGPHGLSSCFLRIRADGVVDCARGQSAHSLLEIKAVALRTVAIKGVHSVRYLCMGADGKMQGLLQYSEEDCAFEEEIRPDGYNVYRSEKHRLPVSLSSAKQRQLYKNRGFLPLSHFLPMLPMVPEEPEDLRGHLESDMFSSPLETDSMDPFGLVTGLEAVRSPSFEKGGSPAGSPTSTEEGTSESATPESGPGTSTEPSEGSAPGSPAGSPTSTEEGTSTEPSEGSAPGTSTEPSEGSAPGTSESATPESGPGSEPATSGSETPGSEPATSGSETPGSPAGSPTSTEEGTSESATPESGPGTSTEPSEGSAPGTSTEPSEGSAPGSPAGSPTSTEEGTSTEPSEGSAPGTSTEPSEGSAPGTSESATPESGPGTSTEPSEGSAPGTSESATPESGPGSEPATSGSETPGTSTEPSEGSAPGTSTEPSEGSAPGTSESATPESGPGTSESATPESGPGSPAGSPTSTEEGTSESATPESGPGSEPATSGSETPGTSESATPESGPGTSTEPSEGSAPGTSTEPSEGSAPGTSTEPSEGSAPGTSTEPSEGSAPGTSTEPSEGSAPGTSTEPSEGSAPGSPAGSPTSTEEGTSTEPSEGSAPGTSESATPESGPGSEPATSGSETPGTSESATPESGPGSEPATSGSETPGTSESATPESGPGTSTEPSEGSAPGTSESATPESGPGSPAGSPTSTEEGSPAGSPTSTEEGSPAGSPTSTEEGTSESATPESGPGTSTEPSEGSAPGHSDGTFTSDLSKQMEEEAVRLFIEWLKNGGPSSGAPPPS

SEQ ID NO: 1806 - protein, 826 aa, Artificial Sequence
  Description of Artificial Sequence: Synthetic polypeptide
MDSDETGFEHSGLWVSVLAGLLLGACQAHPIPDSSPLLQFGGQVRQRYLYTDDAQQTEAHLEIREDGTVGGAADQSPESLLQLKALKPGVIQILGVKTSRFLCQRPDGALYGSLHFDPEACSFRELLLEDGYNVYQSEAHGLPLHLPGNKSPHRDPAPRGPARFLPLPGLPPALPEPPGILAPQPPDVGSSDPLSMVGPSQGRSPSYASGGSPAGSPTSTEEGTSESATPESGPGTSTEPSEGSAPGSPAGSPTSTEEGTSTEPSEGSAPGTSTEPSEGSAPGTSESATPESGPGSEPATSGSETPGSEPATSGSETPGSPAGSPTSTEEGTSESATPESGPGTSTEPSEGSAPGTSTEPSEGSAPGSPAGSPTSTEEGTSTEPSEGSAPGTSTEPSEGSAPGTSESATPESGPGTSTEPSEGSAPGTSESATPESGPGSEPATSGSETPGTSTEPSEGSAPGTSTEPSEGSAPGTSESATPESGPGTSESATPESGPGSPAGSPTSTEEGTSESATPESGPGSEPATSGSETPGTSESATPESGPGTSTEPSEGSAPGTSTEPSEGSAPGTSTEPSEGSAPGTSTEPSEGSAPGTSTEPSEGSAPGTSTEPSEGSAPGSPAGSPTSTEEGTSTEPSEGSAPGTSESATPESGPGSEPATSGSETPGTSESATPESGPGSEPATSGSETPGTSESATPESGPGTSTEPSEGSAPGTSESATPESGPGSPAGSPTSTEEGSPAGSPTSTEEGSPAGSPTSTEEGTSESATPESGPGTSTEPSEGSAPGHSDGTFTSDLSKQMEEEAVRLFIEWLKNGGPSSGAPPPS

SEQ ID NO: 1807 - protein, 651 aa, Artificial Sequence
  Description of Artificial Sequence: Synthetic polypeptide
QLGPQGPPHLVADPSKKQGPWLEEEEEAYGWMDFGGSPAGSPTSTEEGTSESATPESGPGTSTEPSEGSAPGSPAGSPTSTEEGTSTEPSEGSAPGTSTEPSEGSAPGTSESATPESGPGSEPATSGSETPGSEPATSGSETPGSPAGSPTSTEEGTSESATPESGPGTSTEPSEGSAPGTSTEPSEGSAPGSPAGSPTSTEEGTSTEPSEGSAPGTSTEPSEGSAPGTSESATPESGPGTSTEPSEGSAPGTSESATPESGPGSEPATSGSETPGTSTEPSEGSAPGTSTEPSEGSAPGTSESATPESGPGTSESATPESGPGSPAGSPTSTEEGTSESATPESGPGSEPATSGSETPGTSESATPESGPGTSTEPSEGSAPGTSTEPSEGSAPGTSTEPSEGSAPGTSTEPSEGSAPGTSTEPSEGSAPGTSTEPSEGSAPGSPAGSPTSTEEGTSTEPSEGSAPGTSESATPESGPGSEPATSGSETPGTSESATPESGPGSEPATSGSETPGTSESATPESGPGTSTEPSEGSAPGTSESATPESGPGSPAGSPTSTEEGSPAGSPTSTEEGSPAGSPTSTEEGTSESATPESGPGTSTEPSEGSAPGHSDGTFTSDLSKQMEEEAVRLFIEWLKNGGPSSGAPPPS

SEQ ID NO: 1808 - protein, 639 aa, Artificial Sequence
  Description of Artificial Sequence: Synthetic polypeptide
DPSKKQGPWLEEEEEAYGWMDFGGSPAGSPTSTEEGTSESATPESGPGTSTEPSEGSAPGSPAGSPTSTEEGTSTEPSEGSAPGTSTEPSEGSAPGTSESATPESGPGSEPATSGSETPGSEPATSGSETPGSPAGSPTSTEEGTSESATPESGPGTSTEPSEGSAPGTSTEPSEGSAPGSPAGSPTSTEEGTSTEPSEGSAPGTSTEPSEGSAPGTSESATPESGPGTSTEPSEGSAPGTSESATPESGPGSEPATSGSETPGTSTEPSEGSAPGTSTEPSEGSAPGTSESATPESGPGTSESATPESGPGSPAGSPTSTEEGTSESATPESGPGSEPATSGSETPGTSESATPESGPGTSTEPSEGSAPGTSTEPSEGSAPGTSTEPSEGSAPGTSTEPSEGSAPGTSTEPSEGSAPGTSTEPSEGSAPGSPAGSPTSTEEGTSTEPSEGSAPGTSESATPESGPGSEPATSGSETPGTSESATPESGPGSEPATSGSETPGTSESATPESGPGTSTEPSEGSAPGTSESATPESGPGSPAGSPTSTEEGSPAGSPTSTEEGSPAGSPTSTEEGTSESATPESGPGTSTEPSEGSAPGHSDGTFTSDLSKQMEEEAVRLFIEWLKNGGPSSGAPPPS

SEQ ID NO: 1809 - protein, 659 aa, Artificial Sequence
  Description of Artificial Sequence: Synthetic polypeptide
YAEGTFISDYSIAMDKIHQQDFVNWLLAQKGKKNDWKHNITQGGSPAGSPTSTEEGTSESATPESGPGTSTEPSEGSAPGSPAGSPTSTEEGTSTEPSEGSAPGTSTEPSEGSAPGTSESATPESGPGSEPATSGSETPGSEPATSGSETPGSPAGSPTSTEEGTSESATPESGPGTSTEPSEGSAPGTSTEPSEGSAPGSPAGSPTSTEEGTSTEPSEGSAPGTSTEPSEGSAPGTSESATPESGPGTSTEPSEGSAPGTSESATPESGPGSEPATSGSETPGTSTEPSEGSAPGTSTEPSEGSAPGTSESATPESGPGTSESATPESGPGSPAGSPTSTEEGTSESATPESGPGSEPATSGSETPGTSESATPESGPGTSTEPSEGSAPGTSTEPSEGSAPGTSTEPSEGSAPGTSTEPSEGSAPGTSTEPSEGSAPGTSTEPSEGSAPGSPAGSPTSTEEGTSTEPSEGSAPGTSESATPESGPGSEPATSGSETPGTSESATPESGPGSEPATSGSETPGTSESATPESGPGTSTEPSEGSAPGTSESATPESGPGSPAGSPTSTEEGSPAGSPTSTEEGSPAGSPTSTEEGTSESATPESGPGTSTEPSEGSAPGHSDGTFTSDLSKQMEEEAVRLFIEWLKNGGPSSGAPPPS

SEQ ID NO: 1810 - protein, 646 aa, Artificial Sequence
  Description of Artificial Sequence: Synthetic polypeptide
HSQGTFTSDYSKYLDSRRAQDFVQWLMNTGGSPAGSPTSTEEGTSESATPESGPGTSTEPSEGSAPGSPAGSPTSTEEGTSTEPSEGSAPGTSTEPSEGSAPGTSESATPESGPGSEPATSGSETPGSEPATSGSETPGSPAGSPTSTEEGTSESATPESGPGTSTEPSEGSAPGTSTEPSEGSAPGSPAGSPTSTEEGTSTEPSEGSAPGTSTEPSEGSAPGTSESATPESGPGTSTEPSEGSAPGTSESATPESGPGSEPATSGSETPGTSTEPSEGSAPGTSTEPSEGSAPGTSESATPESGPGTSESATPESGPGSPAGSPTSTEEGTSESATPESGPGSEPATSGSETPGTSESATPESGPGTSTEPSEGSAPGTSTEPSEGSAPGTSTEPSEGSAPGTSTEPSEGSAPGTSTEPSEGSAPGTSTEPSEGSAPGSPAGSPTSTEEGTSTEPSEGSAPGTSESATPESGPGSEPATSGSETPGTSESATPESGPGSEPATSGSETPGTSESATPESGPGTSTEPSEGSAPGTSESATPESGPGSPAGSPTSTEEGSPAGSPTSTEEGSPAGSPTSTEEGTSESATPESGPGTSTEPSEGSAPGHSDGTFTSDLSKQMEEEAVRLFIEWLKNGGPSSGAPPPS

SEQ ID NO: 1811 - protein, 654 aa, Artificial Sequence
  Description of Artificial Sequence: Synthetic polypeptide
HDEFERHAEGTFTSDVSSTLEGQAALEFIAWLVKGRGGGSPAGSPTSTEEGTSESATPESGPGTSTEPSEGSAPGSPAGSPTSTEEGTSTEPSEGSAPGTSTEPSEGSAPGTSESATPESGPGSEPATSGSETPGSEPATSGSETPGSPAGSPTSTEEGTSESATPESGPGTSTEPSEGSAPGTSTEPSEGSAPGSPAGSPTSTEEGTSTEPSEGSAPGTSTEPSEGSAPGTSESATPESGPGTSTEPSEGSAPGTSESATPESGPGSEPATSGSETPGTSTEPSEGSAPGTSTEPSEGSAPGTSESATPESGPGTSESATPESGPGSPAGSPTSTEEGTSESATPESGPGSEPATSGSETPGTSESATPESGPGTSTEPSEGSAPGTSTEPSEGSAPGTSTEPSEGSAPGTSTEPSEGSAPGTSTEPSEGSAPGTSTEPSEGSAPGSPAGSPTSTEEGTSTEPSEGSAPGTSESATPESGPGSEPATSGSETPGTSESATPESGPGSEPATSGSETPGTSESATPESGPGTSTEPSEGSAPGTSESATPESGPGSPAGSPTSTEEGSPAGSPTSTEEGSPAGSPTSTEEGTSESATPESGPGTSTEPSEGSAPGHSDGTFTSDLSKQMEEEAVRLFIEWLKNGGPSSGAPPPS

SEQ ID NO: 1812 - protein, 647 aa, Artificial Sequence
  Description of Artificial Sequence: Synthetic polypeptide
HAEGTFTSDVSSYLEGQAALEFIAWLVKGRGGSPAGSPTSTEEGTSESATPESGPGTSTEPSEGSAPGSPAGSPTSTEEGTSTEPSEGSAPGTSTEPSEGSAPGTSESATPESGPGSEPATSGSETPGSEPATSGSETPGSPAGSPTSTEEGTSESATPESGPGTSTEPSEGSAPGTSTEPSEGSAPGSPAGSPTSTEEGTSTEPSEGSAPGTSTEPSEGSAPGTSESATPESGPGTSTEPSEGSAPGTSESATPESGPGSEPATSGSETPGTSTEPSEGSAPGTSTEPSEGSAPGTSESATPESGPGTSESATPESGPGSPAGSPTSTEEGTSESATPESGPGSEPATSGSETPGTSESATPESGPGTSTEPSEGSAPGTSTEPSEGSAPGTSTEPSEGSAPGTSTEPSEGSAPGTSTEPSEGSAPGTSTEPSEGSAPGSPAGSPTSTEEGTSTEPSEGSAPGTSESATPESGPGSEPATSGSETPGTSESATPESGPGSEPATSGSETPGTSESATPESGPGTSTEPSEGSAPGTSESATPESGPGSPAGSPTSTEEGSPAGSPTSTEEGSPAGSPTSTEEGTSESATPESGPGTSTEPSEGSAPGHSDGTFTSDLSKQMEEEAVRLFIEWLKNGGPSSGAPPPS

SEQ ID NO: 1813 - protein, 650 aa, Artificial Sequence
  Description of Artificial Sequence: Synthetic polypeptide
HADGSFSDEMNTILDNLAARDFINWLIETKITDGGSPAGSPTSTEEGTSESATPESGPGTSTEPSEGSAPGSPAGSPTSTEEGTSTEPSEGSAPGTSTEPSEGSAPGTSESATPESGPGSEPATSGSETPGSEPATSGSETPGSPAGSPTSTEEGTSESATPESGPGTSTEPSEGSAPGTSTEPSEGSAPGSPAGSPTSTEEGTSTEPSEGSAPGTSTEPSEGSAPGTSESATPESGPGTSTEPSEGSAPGTSESATPESGPGSEPATSGSETPGTSTEPSEGSAPGTSTEPSEGSAPGTSESATPESGPGTSESATPESGPGSPAGSPTSTEEGTSESATPESGPGSEPATSGSETPGTSESATPESGPGTSTEPSEGSAPGTSTEPSEGSAPGTSTEPSEGSAPGTSTEPSEGSAPGTSTEPSEGSAPGTSTEPSEGSAPGSPAGSPTSTEEGTSTEPSEGSAPGTSESATPESGPGSEPATSGSETPGTSESATPESGPGSEPATSGSETPGTSESATPESGPGTSTEPSEGSAPGTSESATPESGPGSPAGSPTSTEEGSPAGSPTSTEEGSPAGSPTSTEEGTSESATPESGPGTSTEPSEGSAPGHSDGTFTSDLSKQMEEEAVRLFIEWLKNGGPSSGAPPPS

SEQ ID NO: 1814 - protein, 687 aa, Artificial Sequence
  Description of Artificial Sequence: Synthetic polypeptide
GPETLCGAELVDALQFVCGDRGFYFNKPTGYGSSSRRAPQTGIVDECCFRSCDLRRLEMYCAPLKPAKSAGGSPAGSPTSTEEGTSESATPESGPGTSTEPSEGSAPGSPAGSPTSTEEGTSTEPSEGSAPGTSTEPSEGSAPGTSESATPESGPGSEPATSGSETPGSEPATSGSETPGSPAGSPTSTEEGTSESATPESGPGTSTEPSEGSAPGTSTEPSEGSAPGSPAGSPTSTEEGTSTEPSEGSAPGTSTEPSEGSAPGTSESATPESGPGTSTEPSEGSAPGTSESATPESGPGSEPATSGSETPGTSTEPSEGSAPGTSTEPSEGSAPGTSESATPESGPGTSESATPESGPGSPAGSPTSTEEGTSESATPESGPGSEPATSGSETPGTSESATPESGPGTSTEPSEGSAPGTSTEPSEGSAPGTSTEPSEGSAPGTSTEPSEGSAPGTSTEPSEGSAPGTSTEPSEGSAPGSPAGSPTSTEEGTSTEPSEGSAPGTSESATPESGPGSEPATSGSETPGTSESATPESGPGSEPATSGSETPGTSESATPESGPGTSTEPSEGSAPGTSESATPESGPGSPAGSPTSTEEGSPAGSPTSTEEGSPAGSPTSTEEGTSESATPESGPGTSTEPSEGSAPGHSDGTFTSDLSKQMEEEAVRLFIEWLKNGGPSSGAPPPS

SEQ ID NO: 1815 - protein, 684 aa, Artificial Sequence
  Description of Artificial Sequence: Synthetic polypeptide
AYRPSETLCGGELVDTLQFVCGDRGFYFSRPASRVSRRSRGIVEECCFRSCDLALLETYCATPAKSEGGSPAGSPTSTEEGTSESATPESGPGTSTEPSEGSAPGSPAGSPTSTEEGTSTEPSEGSAPGTSTEPSEGSAPGTSESATPESGPGSEPATSGSETPGSEPATSGSETPGSPAGSPTSTEEGTSESATPESGPGTSTEPSEGSAPGTSTEPSEGSAPGSPAGSPTSTEEGTSTEPSEGSAPGTSTEPSEGSAPGTSESATPESGPGTSTEPSEGSAPGTSESATPESGPGSEPATSGSETPGTSTEPSEGSAPGTSTEPSEGSAPGTSESATPESGPGTSESATPESGPGSPAGSPTSTEEGTSESATPESGPGSEPATSGSETPGTSESATPESGPGTSTEPSEGSAPGTSTEPSEGSAPGTSTEPSEGSAPGTSTEPSEGSAPGTSTEPSEGSAPGTSTEPSEGSAPGSPAGSPTSTEEGTSTEPSEGSAPGTSESATPESGPGSEPATSGSETPGTSESATPESGPGSEPATSGSETPGTSESATPESGPGTSTEPSEGSAPGTSESATPESGPGSPAGSPTSTEEGSPAGSPTSTEEGSPAGSPTSTEEGTSESATPESGPGTSTEPSEGSAPGHSDGTFTSDLSKQMEEEAVRLFIEWLKNGGPSSGAPPPS

SEQ ID NO: 1816 - protein, 766 aa, Artificial Sequence
  Description of Artificial Sequence: Synthetic polypeptide
EESQKKLPSSRITCPQGSVAYGSYCYSLILIPQTWSNAELSCQMHFSGHLAFLLSTGEITFVSSLVKNSLTAYQYIWIGLHDPSHGTLPNGSGWKWSSSNVLTFYNWERNPSIAADRGYCAVLSQKSGFQKWRDFNCENELPYICKFKVGGSPAGSPTSTEEGTSESATPESGPGTSTEPSEGSAPGSPAGSPTSTEEGTSTEPSEGSAPGTSTEPSEGSAPGTSESATPESGPGSEPATSGSETPGSEPATSGSETPGSPAGSPTSTEEGTSESATPESGPGTSTEPSEGSAPGTSTEPSEGSAPGSPAGSPTSTEEGTSTEPSEGSAPGTSTEPSEGSAPGTSESATPESGPGTSTEPSEGSAPGTSESATPESGPGSEPATSGSETPGTSTEPSEGSAPGTSTEPSEGSAPGTSESATPESGPGTSESATPESGPGSPAGSPTSTEEGTSESATPESGPGSEPATSGSETPGTSESATPESGPGTSTEPSEGSAPGTSTEPSEGSAPGTSTEPSEGSAPGTSTEPSEGSAPGTSTEPSEGSAPGTSTEPSEGSAPGSPAGSPTSTEEGTSTEPSEGSAPGTSESATPESGPGSEPATSGSETPGTSESATPESGPGSEPATSGSETPGTSESATPESGPGTSTEPSEGSAPGTSESATPESGPGSPAGSPTSTEEGSPAGSPTSTEEGSPAGSPTSTEEGTSESATPESGPGTSTEPSEGSAPGHSDGTFTSDLSKQMEEEAVRLFIEWLKNGGPSSGAPPPS

SEQ ID NO: 1817 - protein, 664 aa, Artificial Sequence
  Description of Artificial Sequence: Synthetic polypeptide
TQAQLLRVGCVLGTCQVQNLSHRLWQLMGPAGRQDSAPVDPSSPHSYGGSPAGSPTSTEEGTSESATPESGPGTSTEPSEGSAPGSPAGSPTSTEEGTSTEPSEGSAPGTSTEPSEGSAPGTSESATPESGPGSEPATSGSETPGSEPATSGSETPGSPAGSPTSTEEGTSESATPESGPGTSTEPSEGSAPGTSTEPSEGSAPGSPAGSPTSTEEGTSTEPSEGSAPGTSTEPSEGSAPGTSESATPESGPGTSTEPSEGSAPGTSESATPESGPGSEPATSGSETPGTSTEPSEGSAPGTSTEPSEGSAPGTSESATPESGPGTSESATPESGPGSPAGSPTSTEEGTSESATPESGPGSEPATSGSETPGTSESATPESGPGTSTEPSEGSAPGTSTEPSEGSAPGTSTEPSEGSAPGTSTEPSEGSAPGTSTEPSEGSAPGTSTEPSEGSAPGSPAGSPTSTEEGTSTEPSEGSAPGTSESATPESGPGSEPATSGSETPGTSESATPESGPGSEPATSGSETPGTSESATPESGPGTSTEPSEGSAPGTSESATPESGPGSPAGSPTSTEEGSPAGSPTSTEEGSPAGSPTSTEEGTSESATPESGPGTSTEPSEGSAPGHSDGTFTSDLSKQMEEEAVRLFIEWLKNGGPSSGAPPPS

SEQ ID NO: 1818 - protein, 763 aa, Artificial Sequence
  Description of Artificial Sequence: Synthetic polypeptide
VPIQKVQDDTKTLIKTIVTRINDISHTQSVSSKQKVTGLDFIPGLHPILTLSKMDQTLAVYQQILTSMPSRNVIQISNDLENLRDLLHVLAFSKSCHLPWASGLETLDSLGGVLEASGYSTEVVALSRLQGSLQDMLWQLDLSPGCGGSPAGSPTSTEEGTSESATPESGPGTSTEPSEGSAPGSPAGSPTSTEEGTSTEPSEGSAPGTSTEPSEGSAPGTSESATPESGPGSEPATSGSETPGSEPATSGSETPGSPAGSPTSTEEGTSESATPESGPGTSTEPSEGSAPGTSTEPSEGSAPGSPAGSPTSTEEGTSTEPSEGSAPGTSTEPSEGSAPGTSESATPESGPGTSTEPSEGSAPGTSESATPESGPGSEPATSGSETPGTSTEPSEGSAPGTSTEPSEGSAPGTSESATPESGPGTSESATPESGPGSPAGSPTSTEEGTSESATPESGPGSEPATSGSETPGTSESATPESGPGTSTEPSEGSAPGTSTEPSEGSAPGTSTEPSEGSAPGTSTEPSEGSAPGTSTEPSEGSAPGTSTEPSEGSAPGSPAGSPTSTEEGTSTEPSEGSAPGTSESATPESGPGSEPATSGSETPGTSESATPESGPGSEPATSGSETPGTSESATPESGPGTSTEPSEGSAPGTSESATPESGPGSPAGSPTSTEEGSPAGSPTSTEEGSPAGSPTSTEEGTSESATPESGPGTSTEPSEGSAPGHSDGTFTSDLSKQMEEEAVRLFIEWLKNGGPSSGAPPPS

SEQ ID NO: 1819 - protein, 642 aa, Artificial Sequence
  Description of Artificial Sequence: Synthetic polypeptide
FRVDEEFQSPFASQSRGYFLFRPRNGGSPAGSPTSTEEGTSESATPESGPGTSTEPSEGSAPGSPAGSPTSTEEGTSTEPSEGSAPGTSTEPSEGSAPGTSESATPESGPGSEPATSGSETPGSEPATSGSETPGSPAGSPTSTEEGTSESATPESGPGTSTEPSEGSAPGTSTEPSEGSAPGSPAGSPTSTEEGTSTEPSEGSAPGTSTEPSEGSAPGTSESATPESGPGTSTEPSEGSAPGTSESATPESGPGSEPATSGSETPGTSTEPSEGSAPGTSTEPSEGSAPGTSESATPESGPGTSESATPESGPGSPAGSPTSTEEGTSESATPESGPGSEPATSGSETPGTSESATPESGPGTSTEPSEGSAPGTSTEPSEGSAPGTSTEPSEGSAPGTSTEPSEGSAPGTSTEPSEGSAPGTSTEPSEGSAPGSPAGSPTSTEEGTSTEPSEGSAPGTSESATPESGPGSEPATSGSETPGTSESATPESGPGSEPATSGSETPGTSESATPESGPGTSTEPSEGSAPGTSESATPESGPGSPAGSPTSTEEGSPAGSPTSTEEGSPAGSPTSTEEGTSESATPESGPGTSTEPSEGSAPGHSDGTFTSDLSKQMEEEAVRLFIEWLKNGGPSSGAPPPS

SEQ ID NO: 1820 - protein, 654 aa, Artificial Sequence
  Description of Artificial Sequence: Synthetic polypeptide
HSQGTFTSDYSKYLDSRRAQDFVQWLMNTKRNRNNIAGGSPAGSPTSTEEGTSESATPESGPGTSTEPSEGSAPGSPAGSPTSTEEGTSTEPSEGSAPGTSTEPSEGSAPGTSESATPESGPGSEPATSGSETPGSEPATSGSETPGSPAGSPTSTEEGTSESATPESGPGTSTEPSEGSAPGTSTEPSEGSAPGSPAGSPTSTEEGTSTEPSEGSAPGTSTEPSEGSAPGTSESATPESGPGTSTEPSEGSAPGTSESATPESGPGSEPATSGSETPGTSTEPSEGSAPGTSTEPSEGSAPGTSESATPESGPGTSESATPESGPGSPAGSPTSTEEGTSESATPESGPGSEPATSGSETPGTSESATPESGPGTSTEPSEGSAPGTSTEPSEGSAPGTSTEPSEGSAPGTSTEPSEGSAPGTSTEPSEGSAPGTSTEPSEGSAPGSPAGSPTSTEEGTSTEPSEGSAPGTSESATPESGPGSEPATSGSETPGTSESATPESGPGSEPATSGSETPGTSESATPESGPGTSTEPSEGSAPGTSESATPESGPGSPAGSPTSTEEGSPAGSPTSTEEGSPAGSPTSTEEGTSESATPESGPGTSTEPSEGSAPGHSDGTFTSDLSKQMEEEAVRLFIEWLKNGGPSSGAPPPS

SEQ ID NO: 1821 - protein, 654 aa, Artificial Sequence
  Description of Artificial Sequence: Synthetic polypeptide
KCNTATCATNRLANFLVHSSNNFGPILPPTNVGSNTYGGSPAGSPTSTEEGTSESATPESGPGTSTEPSEGSAPGSPAGSPTSTEEGTSTEPSEGSAPGTSTEPSEGSAPGTSESATPESGPGSEPATSGSETPGSEPATSGSETPGSPAGSPTSTEEGTSESATPESGPGTSTEPSEGSAPGTSTEPSEGSAPGSPAGSPTSTEEGTSTEPSEGSAPGTSTEPSEGSAPGTSESATPESGPGTSTEPSEGSAPGTSESATPESGPGSEPATSGSETPGTSTEPSEGSAPGTSTEPSEGSAPGTSESATPESGPGTSESATPESGPGSPAGSPTSTEEGTSESATPESGPGSEPATSGSETPGTSESATPESGPGTSTEPSEGSAPGTSTEPSEGSAPGTSTEPSEGSAPGTSTEPSEGSAPGTSTEPSEGSAPGTSTEPSEGSAPGSPAGSPTSTEEGTSTEPSEGSAPGTSESATPESGPGSEPATSGSETPGTSESATPESGPGSEPATSGSETPGTSESATPESGPGTSTEPSEGSAPGTSESATPESGPGSPAGSPTSTEEGSPAGSPTSTEEGSPAGSPTSTEEGTSESATPESGPGTSTEPSEGSAPGHSDGTFTSDLSKQMEEEAVRLFIEWLKNGGPSSGAPPPS

SEQ ID NO: 1822 - protein, 653 aa, Artificial Sequence
  Description of Artificial Sequence: Synthetic polypeptide
YPIKPEAPGEDASPEELNRYYASLRHYLNLVTRQRYGGSPAGSPTSTEEGTSESATPESGPGTSTEPSEGSAPGSPAGSPTSTEEGTSTEPSEGSAPGTSTEPSEGSAPGTSESATPESGPGSEPATSGSETPGSEPATSGSETPGSPAGSPTSTEEGTSESATPESGPGTSTEPSEGSAPGTSTEPSEGSAPGSPAGSPTSTEEGTSTEPSEGSAPGTSTEPSEGSAPGTSESATPESGPGTSTEPSEGSAPGTSESATPESGPGSEPATSGSETPGTSTEPSEGSAPGTSTEPSEGSAPGTSESATPESGPGTSESATPESGPGSPAGSPTSTEEGTSESATPESGPGSEPATSGSETPGTSESATPESGPGTSTEPSEGSAPGTSTEPSEGSAPGTSTEPSEGSAPGTSTEPSEGSAPGTSTEPSEGSAPGTSTEPSEGSAPGSPAGSPTSTEEGTSTEPSEGSAPGTSESATPESGPGSEPATSGSETPGTSESATPESGPGSEPATSGSETPGTSESATPESGPGTSTEPSEGSAPGTSESATPESGPGSPAGSPTSTEEGSPAGSPTSTEEGSPAGSPTSTEEGTSESATPESGPGTSTEPSEGSAPGHSDGTFTSDLSKQMEEEAVRLFIEWLKNGGPSSGAPPPS

SEQ ID NO: 1823 - protein, 658 aa, Artificial Sequence
  Description of Artificial Sequence: Synthetic polypeptide
IVLSLDVPIGLLQILLEQARARAAREQATTNARILARVGHCGGSPAGSPTSTEEGTSESATPESGPGTSTEPSEGSAPGSPAGSPTSTEEGTSTEPSEGSAPGTSTEPSEGSAPGTSESATPESGPGSEPATSGSETPGSEPATSGSETPGSPAGSPTSTEEGTSESATPESGPGTSTEPSEGSAPGTSTEPSEGSAPGSPAGSPTSTEEGTSTEPSEGSAPGTSTEPSEGSAPGTSESATPESGPGTSTEPSEGSAPGTSESATPESGPGSEPATSGSETPGTSTEPSEGSAPGTSTEPSEGSAPGTSESATPESGPGTSESATPESGPGSPAGSPTSTEEGTSESATPESGPGSEPATSGSETPGTSESATPESGPGTSTEPSEGSAPGTSTEPSEGSAPGTSTEPSEGSAPGTSTEPSEGSAPGTSTEPSEGSAPGTSTEPSEGSAPGSPAGSPTSTEEGTSTEPSEGSAPGTSESATPESGPGSEPATSGSETPGTSESATPESGPGSEPATSGSETPGTSESATPESGPGTSTEPSEGSAPGTSESATPESGPGSPAGSPTSTEEGSPAGSPTSTEEGSPAGSPTSTEEGTSESATPESGPGTSTEPSEGSAPGHSDGTFTSDLSKQMEEEAVRLFIEWLKNGGPSSGAPPPS

SEQ ID NO: 1824 - protein, 655 aa, Artificial Sequence
  Description of Artificial Sequence: Synthetic polypeptide
FTLSLDVPTNIMNLLFNIAKAKNLRAQAAANAHLMAQIGGSPAGSPTSTEEGTSESATPESGPGTSTEPSEGSAPGSPAGSPTSTEEGTSTEPSEGSAPGTSTEPSEGSAPGTSESATPESGPGSEPATSGSETPGSEPATSGSETPGSPAGSPTSTEEGTSESATPESGPGTSTEPSEGSAPGTSTEPSEGSAPGSPAGSPTSTEEGTSTEPSEGSAPGTSTEPSEGSAPGTSESATPESGPGTSTEPSEGSAPGTSESATPESGPGSEPATSGSETPGTSTEPSEGSAPGTSTEPSEGSAPGTSESATPESGPGTSESATPESGPGSPAGSPTSTEEGTSESATPESGPGSEPATSGSETPGTSESATPESGPGTSTEPSEGSAPGTSTEPSEGSAPGTSTEPSEGSAPGTSTEPSEGSAPGTSTEPSEGSAPGTSTEPSEGSAPGSPAGSPTSTEEGTSTEPSEGSAPGTSESATPESGPGSEPATSGSETPGTSESATPESGPGSEPATSGSETPGTSESATPESGPGTSTEPSEGSAPGTSESATPESGPGSPAGSPTSTEEGSPAGSPTSTEEGSPAGSPTSTEEGTSESATPESGPGTSTEPSEGSAPGHSDGTFTSDLSKQMEEEAVRLFIEWLKNGGPSSGAPPPS

SEQ ID NO: 1825 - protein, 833 aa, Artificial Sequence
  Description of Artificial Sequence: Synthetic polypeptide
HGEGTFTSDLSKQMEEEAVRLFIEWLKNGGPSSGAPPPSGGSPAGSPTSTEEGTSESATPESGPGTSTEPSEGSAPGSPAGSPTSTEEGTSTEPSEGSAPGTSTEPSEGSAPGTSESATPESGPGSEPATSGSETPGSEPATSGSETPGSPAGSPTSTEEGTSESATPESGPGTSTEPSEGSAPGTSTEPSEGSAPGSPAGSPTSTEEGTSTEPSEGSAPGTSTEPSEGSAPGTSESATPESGPGTSTEPSEGSAPGTSESATPESGPGSEPATSGSETPGTSTEPSEGSAPGTSTEPSEGSAPGTSESATPESGPGTSESATPESGPGSPAGSPTSTEEGTSESATPESGPGSEPATSGSETPGTSESATPESGPGTSTEPSEGSAPGTSTEPSEGSAPGTSTEPSEGSAPGTSTEPSEGSAPGTSTEPSEGSAPGTSTEPSEGSAPGSPAGSPTSTEEGTSTEPSEGSAPGTSESATPESGPGSEPATSGSETPGTSESATPESGPGSEPATSGSETPGTSESATPESGPGTSTEPSEGSAPGTSESATPESGPGSPAGSPTSTEEGSPAGSPTSTEEGSPAGSPTSTEEGTSESATPESGPGTSTEPSEGSAPGMRSGCVVVHVWILAGLWLAVAGRPLAFSDAGPHVHYGWGDPIRLRHLYTSGPHGLSSCFLRIRADGVVDCARGQSAHSLLEIKAVALRTVAIKGVHSVRYLCMGADGKMQGLLQYSEEDCAFEEEIRPDGYNVYRSEKHRLPVSLSSAKQRQLYKNRGFLPLSHFLPMLPMVPEEPEDLRGHLESDMFSSPLETDSMDPFGLVTGLEAVRSPSFEK

SEQ ID NO: 1826 - protein, 826 aa, Artificial Sequence
  Description of Artificial Sequence: Synthetic polypeptide
HGEGTFTSDLSKQMEEEAVRLFIEWLKNGGPSSGAPPPSGGSPAGSPTSTEEGTSESATPESGPGTSTEPSEGSAPGSPAGSPTSTEEGTSTEPSEGSAPGTSTEPSEGSAPGTSESATPESGPGSEPATSGSETPGSEPATSGSETPGSPAGSPTSTEEGTSESATPESGPGTSTEPSEGSAPGTSTEPSEGSAPGSPAGSPTSTEEGTSTEPSEGSAPGTSTEPSEGSAPGTSESATPESGPGTSTEPSEGSAPGTSESATPESGPGSEPATSGSETPGTSTEPSEGSAPGTSTEPSEGSAPGTSESATPESGPGTSESATPESGPGSPAGSPTSTEEGTSESATPESGPGSEPATSGSETPGTSESATPESGPGTSTEPSEGSAPGTSTEPSEGSAPGTSTEPSEGSAPGTSTEPSEGSAPGTSTEPSEGSAPGTSTEPSEGSAPGSPAGSPTSTEEGTSTEPSEGSAPGTSESATPESGPGSEPATSGSETPGTSESATPESGPGSEPATSGSETPGTSESATPESGPGTSTEPSEGSAPGTSESATPESGPGSPAGSPTSTEEGSPAGSPTSTEEGSPAGSPTSTEEGTSESATPESGPGTSTEPSEGSAPGMDSDETGFEHSGLWVSVLAGLLLGACQAHPIPDSSPLLQFGGQVRQRYLYTDDAQQTEAHLEIREDGTVGGAADQSPESLLQLKALKPGVIQILGVKTSRFLCQRPDGALYGSLHFDPEACSFRELLLEDGYNVYQSEAHGLPLHLPGNKSPHRDPAPRGPARFLPLPGLPPALPEPPGILAPQPPDVGSSDPLSMVGPSQGRSPSYAS

SEQ ID NO: 1827 - protein, 651 aa, Artificial Sequence
  Description of Artificial Sequence: Synthetic polypeptide
HGEGTFTSDLSKQMEEEAVRLFIEWLKNGGPSSGAPPPSGGSPAGSPTSTEEGTSESATPESGPGTSTEPSEGSAPGSPAGSPTSTEEGTSTEPSEGSAPGTSTEPSEGSAPGTSESATPESGPGSEPATSGSETPGSEPATSGSETPGSPAGSPTSTEEGTSESATPESGPGTSTEPSEGSAPGTSTEPSEGSAPGSPAGSPTSTEEGTSTEPSEGSAPGTSTEPSEGSAPGTSESATPESGPGTSTEPSEGSAPGTSESATPESGPGSEPATSGSETPGTSTEPSEGSAPGTSTEPSEGSAPGTSESATPESGPGTSESATPESGPGSPAGSPTSTEEGTSESATPESGPGSEPATSGSETPGTSESATPESGPGTSTEPSEGSAPGTSTEPSEGSAPGTSTEPSEGSAPGTSTEPSEGSAPGTSTEPSEGSAPGTSTEPSEGSAPGSPAGSPTSTEEGTSTEPSEGSAPGTSESATPESGPGSEPATSGSETPGTSESATPESGPGSEPATSGSETPGTSESATPESGPGTSTEPSEGSAPGTSESATPESGPGSPAGSPTSTEEGSPAGSPTSTEEGSPAGSPTSTEEGTSESATPESGPGTSTEPSEGSAPGQLGPQGPPHLVADPSKKQGPWLEEEEEAYGWMDF

SEQ ID NO: 1828 - protein, 639 aa, Artificial Sequence
  Description of Artificial Sequence: Synthetic polypeptide
HGEGTFTSDLSKQMEEEAVRLFIEWLKNGGPSSGAPPPSGGSPAGSPTSTEEGTSESATPESGPGTSTEPSEGSAPGSPAGSPTSTEEGTSTEPSEGSAPGTSTEPSEGSAPGTSESATPESGPGSEPATSGSETPGSEPATSGSETPGSPAGSPTSTEEGTSESATPESGPGTSTEPSEGSAPGTSTEPSEGSAPGSPAGSPTSTEEGTSTEPSEGSAPGTSTEPSEGSAPGTSESATPESGPGTSTEPSEGSAPGTSESATPESGPGSEPATSGSETPGTSTEPSEGSAPGTSTEPSEGSAPGTSESATPESGPGTSESATPESGPGSPAGSPTSTEEGTSESATPESGPGSEPATSGSETPGTSESATPESGPGTSTEPSEGSAPGTSTEPSEGSAPGTSTEPSEGSAPGTSTEPSEGSAPGTSTEPSEGSAPGTSTEPSEGSAPGSPAGSPTSTEEGTSTEPSEGSAPGTSESATPESGPGSEPATSGSETPGTSESATPESGPGSEPATSGSETPGTSESATPESGPGTSTEPSEGSAPGTSESATPESGPGSPAGSPTSTEEGSPAGSPTSTEEGSPAGSPTSTEEGTSESATPESGPGTSTEPSEGSAPGDPSKKQGPWLEEEEEAYGWMDF

SEQ ID NO: 1829 - protein, 659 aa, Artificial Sequence
  Description of Artificial Sequence: Synthetic polypeptide
HGEGTFTSDLSKQMEEEAVRLFIEWLKNGGPSSGAPPPSGGSPAGSPTSTEEGTSESATPESGPGTSTEPSEGSAPGSPAGSPTSTEEGTSTEPSEGSAPGTSTEPSEGSAPGTSESATPESGPGSEPATSGSETPGSEPATSGSETPGSPAGSPTSTEEGTSESATPESGPGTSTEPSEGSAPGTSTEPSEGSAPGSPAGSPTSTEEGTSTEPSEGSAPGTSTEPSEGSAPGTSESATPESGPGTSTEPSEGSAPGTSESATPESGPGSEPATSGSETPGTSTEPSEGSAPGTSTEPSEGSAPGTSESATPESGPGTSESATPESGPGSPAGSPTSTEEGTSESATPESGPGSEPATSGSETPGTSESATPESGPGTSTEPSEGSAPGTSTEPSEGSAPGTSTEPSEGSAPGTSTEPSEGSAPGTSTEPSEGSAPGTSTEPSEGSAPGSPAGSPTSTEEGTSTEPSEGSAPGTSESATPESGPGSEPATSGSETPGTSESATPESGPGSEPATSGSETPGTSESATPESGPGTSTEPSEGSAPGTSESATPESGPGSPAGSPTSTEEGSPAGSPTSTEEGSPAGSPTSTEEGTSESATPESGPGTSTEPSEGSAPGYAEGTFISDYSIAMDKIHQQDFVNWLLAQKGKKNDWKHNITQ

SEQ ID NO: 1830 - protein, 646 aa, Artificial Sequence
  Description of Artificial Sequence: Synthetic polypeptide
HGEGTFTSDLSKQMEEEAVRLFIEWLKNGGPSSGAPPPSGGSPAGSPTSTEEGTSESATPESGPGTSTEPSEGSAPGSPAGSPTSTEEGTSTEPSEGSAPGTSTEPSEGSAPGTSESATPESGPGSEPATSGSETPGSEPATSGSETPGSPAGSPTSTEEGTSESATPESGPGTSTEPSEGSAPGTSTEPSEGSAPGSPAGSPTSTEEGTSTEPSEGSAPGTSTEPSEGSAPGTSESATPESGPGTSTEPSEGSAPGTSESATPESGPGSEPATSGSETPGTSTEPSEGSAPGTSTEPSEGSAPGTSESATPESGPGTSESATPESGPGSPAGSPTSTEEGTSESATPESGPGSEPATSGSETPGTSESATPESGPGTSTEPSEGSAPGTSTEPSEGSAPGTSTEPSEGSAPGTSTEPSEGSAPGTSTEPSEGSAPGTSTEPSEGSAPGSPAGSPTSTEEGTSTEPSEGSAPGTSESATPESGPGSEPATSGSETPGTSESATPESGPGSEPATSGSETPGTSESATPESGPGTSTEPSEGSAPGTSESATPESGPGSPAGSPTSTEEGSPAGSPTSTEEGSPAGSPTSTEEGTSESATPESGPGTSTEPSEGSAPGHSQGTFTSDYSKYLDSRRAQDFVQWLMNT

SEQ ID NO: 1831 - protein, 654 aa, Artificial Sequence
  Description of Artificial Sequence: Synthetic polypeptide
HGEGTFTSDLSKQMEEEAVRLFIEWLKNGGPSSGAPPPSGGSPAGSPTSTEEGTSESATPESGPGTSTEPSEGSAPGSPAGSPTSTEEGTSTEPSEGSAPGTSTEPSEGSAPGTSESATPESGPGSEPATSGSETPGSEPATSGSETPGSPAGSPTSTEEGTSESATPESGPGTSTEPSEGSAPGTSTEPSEGSAPGSPAGSPTSTEEGTSTEPSEGSAPGTSTEPSEGSAPGTSESATPESGPGTSTEPSEGSAPGTSESATPESGPGSEPATSGSETPGTSTEPSEGSAPGTSTEPSEGSAPGTSESATPESGPGTSESATPESGPGSPAGSPTSTEEGTSESATPESGPGSEPATSGSETPGTSESATPESGPGTSTEPSEGSAPGTSTEPSEGSAPGTSTEPSEGSAPGTSTEPSEGSAPGTSTEPSEGSAPGTSTEPSEGSAPGSPAGSPTSTEEGTSTEPSEGSAPGTSESATPESGPGSEPATSGSETPGTSESATPESGPGSEPATSGSETPGTSESATPESGPGTSTEPSEGSAPGTSESATPESGPGSPAGSPTSTEEGSPAGSPTSTEEGSPAGSPTSTEEGTSESATPESGPGTSTEPSEGSAPGHDEFERHAEGTFTSDVSSTLEGQAALEFIAWLVKGRG

SEQ ID NO: 1832 - protein, 647 aa, Artificial Sequence
  Description of Artificial Sequence: Synthetic polypeptide
HGEGTFTSDLSKQMEEEAVRLFIEWLKNGGPSSGAPPPSGGSPAGSPTSTEEGTSESATPESGPGTSTEPSEGSAPGSPAGSPTSTEEGTSTEPSEGSAPGTSTEPSEGSAPGTSESATPESGPGSEPATSGSETPGSEPATSGSETPGSPAGSPTSTEEGTSESATPESGPGTSTEPSEGSAPGTSTEPSEGSAPGSPAGSPTSTEEGTSTEPSEGSAPGTSTEPSEGSAPGTSESATPESGPGTSTEPSEGSAPGTSESATPESGPGSEPATSGSETPGTSTEPSEGSAPGTSTEPSEGSAPGTSESATPESGPGTSESATPESGPGSPAGSPTSTEEGTSESATPESGPGSEPATSGSETPGTSESATPESGPGTSTEPSEGSAPGTSTEPSEGSAPGTSTEPSEGSAPGTSTEPSEGSAPGTSTEPSEGSAPGTSTEPSEGSAPGSPAGSPTSTEEGTSTEPSEGSAPGTSESATPESGPGSEPATSGSETPGTSESATPESGPGSEPATSGSETPGTSESATPESGPGTSTEPSEGSAPGTSESATPESGPGSPAGSPTSTEEGSPAGSPTSTEEGSPAGSPTSTEEGTSESATPESGPGTSTEPSEGSAPGHAEGTFTSDVSSYLEGQAALEFIAWLVKGR

SEQ ID NO: 1833 - protein, 650 aa, Artificial Sequence
  Description of Artificial Sequence: Synthetic polypeptide
HGEGTFTSDLSKQMEEEAVRLFIEWLKNGGPSSGAPPPSGGSPAGSPTSTEEGTSESATPESGPGTSTEPSEGSAPGSPAGSPTSTEEGTSTEPSEGSAPGTSTEPSEGSAPGTSESATPESGPGSEPATSGSETPGSEPATSGSETPGSPAGSPTSTEEGTSESATPESGPGTSTEPSEGSAPGTSTEPSEGSAPGSPAGSPTSTEEGTSTEPSEGSAPGTSTEPSEGSAPGTSESATPESGPGTSTEPSEGSAPGTSESATPESGPGSEPATSGSETPGTSTEPSEGSAPGTSTEPSEGSAPGTSESATPESGPGTSESATPESGPGSPAGSPTSTEEGTSESATPESGPGSEPATSGSETPGTSESATPESGPGTSTEPSEGSAPGTSTEPSEGSAPGTSTEPSEGSAPGTSTEPSEGSAPGTSTEPSEGSAPGTSTEPSEGSAPGSPAGSPTSTEEGTSTEPSEGSAPGTSESATPESGPGSEPATSGSETPGTSESATPESGPGSEPATSGSETPGTSESATPESGPGTSTEPSEGSAPGTSESATPESGPGSPAGSPTSTEEGSPAGSPTSTEEGSPAGSPTSTEEGTSESATPESGPGTSTEPSEGSAPGHADGSFSDEMNTILDNLAARDFINWLIETKITD

SEQ ID NO: 1834 - protein, 687 aa, Artificial Sequence
  Description of Artificial Sequence: Synthetic polypeptide
HGEGTFTSDLSKQMEEEAVRLFIEWLKNGGPSSGAPPPSGGSPAGSPTSTEEGTSESATPESGPGTSTEPSEGSAPGSPAGSPTSTEEGTSTEPSEGSAPGTSTEPSEGSAPGTSESATPESGPGSEPATSGSETPGSEPATSGSETPGSPAGSPTSTEEGTSESATPESGPGTSTEPSEGSAPGTSTEPSEGSAPGSPAGSPTSTEEGTSTEPSEGSAPGTSTEPSEGSAPGTSESATPESGPGTSTEPSEGSAPGTSESATPESGPGSEPATSGSETPGTSTEPSEGSAPGTSTEPSEGSAPGTSESATPESGPGTSESATPESGPGSPAGSPTSTEEGTSESATPESGPGSEPATSGSETPGTSESATPESGPGTSTEPSEGSAPGTSTEPSEGSAPGTSTEPSEGSAPGTSTEPSEGSAPGTSTEPSEGSAPGTSTEPSEGSAPGSPAGSPTSTEEGTSTEPSEGSAPGTSESATPESGPGSEPATSGSETPGTSESATPESGPGSEPATSGSETPGTSESATPESGPGTSTEPSEGSAPGTSESATPESGPGSPAGSPTSTEEGSPAGSPTSTEEGSPAGSPTSTEEGTSESATPESGPGTSTEPSEGSAPGGPETLCGAELVDALQFVCGDRGFYFNKPTGYGSSSRRAPQTGIVDECCFRSCDLRRLEMYCAPLKPAKSA

SEQ ID NO: 1835 - protein, 684 aa, Artificial Sequence
  Description of Artificial Sequence: Synthetic polypeptide
HGEGTFTSDLSKQMEEEAVRLFIEWLKNGGPSSGAPPPSGGSPAGSPTSTEEGTSESATPESGPGTSTEPSEGSAPGSPAGSPTSTEEGTSTEPSEGSAPGTSTEPSEGSAPGTSESATPESGPGSEPATSGSETPGSEPATSGSETPGSPAGSPTSTEEGTSESATPESGPGTSTEPSEGSAPGTSTEPSEGSAPGSPAGSPTSTEEGTSTEPSEGSAPGTSTEPSEGSAPGTSESATPESGPGTSTEPSEGSAPGTSESATPESGPGSEPATSGSETPGTSTEPSEGSAPGTSTEPSEGSAPGTSESATPESGPGTSESATPESGPGSPAGSPTSTEEGTSESATPESGPGSEPATSGSETPGTSESATPESGPGTSTEPSEGSAPGTSTEPSEGSAPGTSTEPSEGSAPGTSTEPSEGSAPGTSTEPSEGSAPGTSTEPSEGSAPGSPAGSPTSTEEGTSTEPSEGSAPGTSESATPESGPGSEPATSGSETPGTSESATPESGPGSEPATSGSETPGTSESATPESGPGTSTEPSEGSAPGTSESATPESGPGSPAGSPTSTEEGSPAGSPTSTEEGSPAGSPTSTEEGTSESATPESGPGTSTEPSEGSAPGAYRPSETLCGGELVDTLQFVCGDRGFYFSRPASRVSRRSRGIVEECCFRSCDLALLETYCATPAKSE

SEQ ID NO: 1836 - protein, 766 aa, Artificial Sequence
  Description of Artificial Sequence: Synthetic polypeptide
HGEGTFTSDLSKQMEEEAVRLFIEWLKNGGPSSGAPPPSGGSPAGSPTSTEEGTSESATPESGPGTSTEPSEGSAPGSPAGSPTSTEEGTSTEPSEGSAPGTSTEPSEGSAPGTSESATPESGPGSEPATSGSETPGSEPATSGSETPGSPAGSPTSTEEGTSESATPESGPGTSTEPSEGSAPGTSTEPSEGSAPGSPAGSPTSTEEGTSTEPSEGSAPGTSTEPSEGSAPGTSESATPESGPGTSTEPSEGSAPGTSESATPESGPGSEPATSGSETPGTSTEPSEGSAPGTSTEPSEGSAPGTSESATPESGPGTSESATPESGPGSPAGSPTSTEEGTSESATPESGPGSEPATSGSETPGTSESATPESGPGTSTEPSEGSAPGTSTEPSEGSAPGTSTEPSEGSAPGTSTEPSEGSAPGTSTEPSEGSAPGTSTEPSEGSAPGSPAGSPTSTEEGTSTEPSEGSAPGTSESATPESGPGSEPATSGSETPGTSESATPESGPGSEPATSGSETPGTSESATPESGPGTSTEPSEGSAPGTSESATPESGPGSPAGSPTSTEEGSPAGSPTSTEEGSPAGSPTSTEEGTSESATPESGPGTSTEPSEGSAPGEESQKKLPSSRITCPQGSVAYGSYCYSLILIPQTWSNAELSCQMHFSGHLAFLLSTGEITFVSSLVKNSLTAYQYIWIGLHDPSHGTLPNGSGWKWSSSNVLTFYNWERNPSIAADRGYCAVLSQKSGFQKWRDFNCENELPYICKFKV

SEQ ID NO: 1837 - protein, 664 aa, Artificial Sequence
  Description of Artificial Sequence: Synthetic polypeptide
HGEGTFTSDLSKQMEEEAVRLFIEWLKNGGPSSGAPPPSGGSPAGSPTSTEEGTSESATPESGPGTSTEPSEGSAPGSPAGSPTSTEEGTSTEPSEGSAPGTSTEPSEGSAPGTSESATPESGPGSEPATSGSETPGSEPATSGSETPGSPAGSPTSTEEGTSESATPESGPGTSTEPSEGSAPGTSTEPSEGSAPGSPAGSPTSTEEGTSTEPSEGSAPGTSTEPSEGSAPGTSESATPESGPGTSTEPSEGSAPGTSESATPESGPGSEPATSGSETPGTSTEPSEGSAPGTSTEPSEGSAPGTSESATPESGPGTSESATPESGPGSPAGSPTSTEEGTSESATPESGPGSEPATSGSETPGTSESATPESGPGTSTEPSEGSAPGTSTEPSEGSAPGTSTEPSEGSAPGTSTEPSEGSAPGTSTEPSEGSAPGTSTEPSEGSAPGSPAGSPTSTEEGTSTEPSEGSAPGTSESATPESGPGSEPATSGSETPGTSESATPESGPGSEPATSGSETPGTSESATPESGPGTSTEPSEGSAPGTSESATPESGPGSPAGSPTSTEEGSPAGSPTSTEEGSPAGSPTSTEEGTSESATPESGPGTSTEPSEGSAPGTQAQLLRVGCVLGTCQVQNLSHRLWQLMGPAGRQDSAPVDPSSPHSY

SEQ ID NO: 1838 - protein, 763 aa, Artificial Sequence
  Description of Artificial Sequence: Synthetic polypeptide
HGEGTFTSDLSKQMEEEAVRLFIEWLKNGGPSSGAPPPSGGSPAGSPTSTEEGTSESATPESGPGTSTEPSEGSAPGSPAGSPTSTEEGTSTEPSEGSAPGTSTEPSEGSAPGTSESATPESGPGSEPATSGSETPGSEPATSGSETPGSPAGSPTSTEEGTSESATPESGPGTSTEPSEGSAPGTSTEPSEGSAPGSPAGSPTSTEEGTSTEPSEGSAPGTSTEPSEGSAPGTSESATPESGPGTSTEPSEGSAPGTSESATPESGPGSEPATSGSETPGTSTEPSEGSAPGTSTEPSEGSAPGTSESATPESGPGTSESATPESGPGSPAGSPTSTEEGTSESATPESGPGSEPATSGSETPGTSESATPESGPGTSTEPSEGSAPGTSTEPSEGSAPGTSTEPSEGSAPGTSTEPSEGSAPGTSTEPSEGSAPGTSTEPSEGSAPGSPAGSPTSTEEGTSTEPSEGSAPGTSESATPESGPGSEPATSGSETPGTSESATPESGPGSEPATSGSETPGTSESATPESGPGTSTEPSEGSAPGTSESATPESGPGSPAGSPTSTEEGSPAGSPTSTEEGSPAGSPTSTEEGTSESATPESGPGTSTEPSEGSAPGVPIQKVQDDTKTLIKTIVTRINDISHTQSVSSKQKVTGLDFIPGLHPILTLSKMDQTLAVYQQILTSMPSRNVIQISNDLENLRDLLHVLAFSKSCHLPWASGLETLDSLGGVLEASGYSTEVVALSRLQGSLQDMLWQLDLSPGC

SEQ ID NO: 1839 - protein, 642 aa, Artificial Sequence
  Description of Artificial Sequence: Synthetic polypeptide
HGEGTFTSDLSKQMEEEAVRLFIEWLKNGGPSSGAPPPSGGSPAGSPTSTEEGTSESATPESGPGTSTEPSEGSAPGSPAGSPTSTEEGTSTEPSEGSAPGTSTEPSEGSAPGTSESATPESGPGSEPATSGSETPGSEPATSGSETPGSPAGSPTSTEEGTSESATPESGPGTSTEPSEGSAPGTSTEPSEGSAPGSPAGSPTSTEEGTSTEPSEGSAPGTSTEPSEGSAPGTSESATPESGPGTSTEPSEGSAPGTSESATPESGPGSEPATSGSETPGTSTEPSEGSAPGTSTEPSEGSAPGTSESATPESGPGTSESATPESGPGSPAGSPTSTEEGTSESATPESGPGSEPATSGSETPGTSESATPESGPGTSTEPSEGSAPGTSTEPSEGSAPGTSTEPSEGSAPGTSTEPSEGSAPGTSTEPSEGSAPGTSTEPSEGSAPGSPAGSPTSTEEGTSTEPSEGSAPGTSESATPESGPGSEPATSGSETPGTSESATPESGPGSEPATSGSETPGTSESATPESGPGTSTEPSEGSAPGTSESATPESGPGSPAGSPTSTEEGSPAGSPTSTEEGSPAGSPTSTEEGTSESATPESGPGTSTEPSEGSAPGFRVDEEFQSPFASQSRGYFLFRPRN

SEQ ID NO: 1840 - protein, 654 aa, Artificial Sequence
  Description of Artificial Sequence: Synthetic polypeptide
HGEGTFTSDLSKQMEEEAVRLFIEWLKNGGPSSGAPPPSGGSPAGSPTSTEEGTSESATPESGPGTSTEPSEGSAPGSPAGSPTSTEEGTSTEPSEGSAPGTSTEPSEGSAPGTSESATPESGPGSEPATSGSETPGSEPATSGSETPGSPAGSPTSTEEGTSESATPESGPGTSTEPSEGSAPGTSTEPSEGSAPGSPAGSPTSTEEGTSTEPSEGSAPGTSTEPSEGSAPGTSESATPESGPGTSTEPSEGSAPGTSESATPESGPGSEPATSGSETPGTSTEPSEGSAPGTSTEPSEGSAPGTSESATPESGPGTSESATPESGPGSPAGSPTSTEEGTSESATPESGPGSEPATSGSETPGTSESATPESGPGTSTEPSEGSAPGTSTEPSEGSAPGTSTEPSEGSAPGTSTEPSEGSAPGTSTEPSEGSAPGTSTEPSEGSAPGSPAGSPTSTEEGTSTEPSEGSAPGTSESATPESGPGSEPATSGSETPGTSESATPESGPGSEPATSGSETPGTSESATPESGPGTSTEPSEGSAPGTSESATPESGPGSPAGSPTSTEEGSPAGSPTSTEEGSPAGSPTSTEEGTSESATPESGPGTSTEPSEGSAPGHSQGTFTSDYSKYLDSRRAQDFVQWLMNTKRNRNNIA

SEQ ID NO: 1841 - protein, 654 aa, Artificial Sequence; identical to SEQ ID NO: 1762
  Description of Artificial Sequence: Synthetic polypeptide

SEQ ID NO: 1842 - protein, 653 aa, Artificial Sequence
  Description of Artificial Sequence: Synthetic polypeptide
HGEGTFTSDLSKQMEEEAVRLFIEWLKNGGPSSGAPPPSGGSPAGSPTSTEEGTSESATPESGPGTSTEPSEGSAPGSPAGSPTSTEEGTSTEPSEGSAPGTSTEPSEGSAPGTSESATPESGPGSEPATSGSETPGSEPATSGSETPGSPAGSPTSTEEGTSESATPESGPGTSTEPSEGSAPGTSTEPSEGSAPGSPAGSPTSTEEGTSTEPSEGSAPGTSTEPSEGSAPGTSESATPESGPGTSTEPSEGSAPGTSESATPESGPGSEPATSGSETPGTSTEPSEGSAPGTSTEPSEGSAPGTSESATPESGPGTSESATPESGPGSPAGSPTSTEEGTSESATPESGPGSEPATSGSETPGTSESATPESGPGTSTEPSEGSAPGTSTEPSEGSAPGTSTEPSEGSAPGTSTEPSEGSAPGTSTEPSEGSAPGTSTEPSEGSAPGSPAGSPTSTEEGTSTEPSEGSAPGTSESATPESGPGSEPATSGSETPGTSESATPESGPGSEPATSGSETPGTSESATPESGPGTSTEPSEGSAPGTSESATPESGPGSPAGSPTSTEEGSPAGSPTSTEEGSPAGSPTSTEEGTSESATPESGPGTSTEPSEGSAPGYPIKPEAPGEDASPEELNRYYASLRHYLNLVTRQRY

SEQ ID NO: 1843 - protein, 658 aa, Artificial Sequence
  Description of Artificial Sequence: Synthetic polypeptide
HGEGTFTSDLSKQMEEEAVRLFIEWLKNGGPSSGAPPPSGGSPAGSPTSTEEGTSESATPESGPGTSTEPSEGSAPGSPAGSPTSTEEGTSTEPSEGSAPGTSTEPSEGSAPGTSESATPESGPGSEPATSGSETPGSEPATSGSETPGSPAGSPTSTEEGTSESATPESGPGTSTEPSEGSAPGTSTEPSEGSAPGSPAGSPTSTEEGTSTEPSEGSAPGTSTEPSEGSAPGTSESATPESGPGTSTEPSEGSAPGTSESATPESGPGSEPATSGSETPGTSTEPSEGSAPGTSTEPSEGSAPGTSESATPESGPGTSESATPESGPGSPAGSPTSTEEGTSESATPESGPGSEPATSGSETPGTSESATPESGPGTSTEPSEGSAPGTSTEPSEGSAPGTSTEPSEGSAPGTSTEPSEGSAPGTSTEPSEGSAPGTSTEPSEGSAPGSPAGSPTSTEEGTSTEPSEGSAPGTSESATPESGPGSEPATSGSETPGTSESATPESGPGSEPATSGSETPGTSESATPESGPGTSTEPSEGSAPGTSESATPESGPGSPAGSPTSTEEGSPAGSPTSTEEGSPAGSPTSTEEGTSESATPESGPGTSTEPSEGSAPGIVLSLDVPIGLLQILLEQARARAAREQATTNARILARVGHC

SEQ ID NO: 1844 - protein, 655 aa, Artificial Sequence
  Description of Artificial Sequence: Synthetic polypeptide
HGEGTFTSDLSKQMEEEAVRLFIEWLKNGGPSSGAPPPSGGSPAGSPTSTEEGTSESATPESGPGTSTEPSEGSAPGSPAGSPTSTEEGTSTEPSEGSAPGTSTEPSEGSAPGTSESATPESGPGSEPATSGSETPGSEPATSGSETPGSPAGSPTSTEEGTSESATPESGPGTSTEPSEGSAPGTSTEPSEGSAPGSPAGSPTSTEEGTSTEPSEGSAPGTSTEPSEGSAPGTSESATPESGPGTSTEPSEGSAPGTSESATPESGPGSEPATSGSETPGTSTEPSEGSAPGTSTEPSEGSAPGTSESATPESGPGTSESATPESGPGSPAGSPTSTEEGTSESATPESGPGSEPATSGSETPGTSESATPESGPGTSTEPSEGSAPGTSTEPSEGSAPGTSTEPSEGSAPGTSTEPSEGSAPGTSTEPSEGSAPGTSTEPSEGSAPGSPAGSPTSTEEGTSTEPSEGSAPGTSESATPESGPGSEPATSGSETPGTSESATPESGPGSEPATSGSETPGTSESATPESGPGTSTEPSEGSAPGTSESATPESGPGSPAGSPTSTEEGSPAGSPTSTEEGSPAGSPTSTEEGTSESATPESGPGTSTEPSEGSAPGFTLSLDVPTNIMNLLFNIAKAKNLRAQAAANAHLMAQI

SEQ ID NO: 1845 - protein, 831 aa, Artificial Sequence
  Description of Artificial Sequence: Synthetic polypeptide
MRSGCVVVHVWILAGLWLAVAGRPLAFSDAGPHVHYGWGDPIRLRHLYTSGPHGLSSCFLRIRADGVVDCARGQSAHSLLEIKAVALRTVAIKGVHSVRYLCMGADGKMQGLLQYSEEDCAFEEEIRPDGYNVYRSEKHRLPVSLSSAKQRQLYKNRGFLPLSHFLPMLPMVPEEPEDLRGHLESDMFSSPLETDSMDPFGLVTGLEAVRSPSFEKGGSPAGSPTSTEEGTSESATPESGPGTSTEPSEGSAPGSPAGSPTSTEEGTSTEPSEGSAPGTSTEPSEGSAPGTSESATPESGPGSEPATSGSETPGSEPATSGSETPGSPAGSPTSTEEGTSESATPESGPGTSTEPSEGSAPGTSTEPSEGSAPGSPAGSPTSTEEGTSTEPSEGSAPGTSTEPSEGSAPGTSESATPESGPGTSTEPSEGSAPGTSESATPESGPGSEPATSGSETPGTSTEPSEGSAPGTSTEPSEGSAPGTSESATPESGPGTSESATPESGPGSPAGSPTSTEEGTSESATPESGPGSEPATSGSETPGTSESATPESGPGTSTEPSEGSAPGTSTEPSEGSAPGTSTEPSEGSAPGTSTEPSEGSAPGTSTEPSEGSAPGTSTEPSEGSAPGSPAGSPTSTEEGTSTEPSEGSAPGTSESATPESGPGSEPATSGSETPGTSESATPESGPGSEPATSGSETPGTSESATPESGPGTSTEPSEGSAPGTSESATPESGPGSPAGSPTSTEEGSPAGSPTSTEEGSPAGSPTSTEEGTSESATPESGPGTSTEPSEGSAPGKCNTATCATQRLANFLVHSSNNFGAILSSTNVGSNTY

SEQ ID NO: 1846 - protein, 826 aa, Artificial Sequence
  Description of Artificial Sequence: Synthetic polypeptide
MDSDETGFEHSGLWVSVLAGLLLGACQAHPIPDSSPLLQFGGQVRQRYLYTDDAQQTEAHLEIREDGTVGGAADQSPESLLQLKALKPGVIQILGVKTSRFLCQRPDGALYGSLHFDPEACSFRELLLEDGYNVYQSEAHGLPLHLPGNKSPHRDPAPRGPARFLPLPGLPPALPEPPGILAPQPPDVGSSDPLSMVGPSQGRSPSYASGGSPAGSPTSTEEGTSESATPESGPGTSTEPSEGSAPGSPAGSPTSTEEGTSTEPSEGSAPGTSTEPSEGSAPGTSESATPESGPGSEPATSGSETPGSEPATSGSETPGSPAGSPTSTEEGTSESATPESGPGTSTEPSEGSAPGTSTEPSEGSAPGSPAGSPTSTEEGTSTEPSEGSAPGTSTEPSEGSAPGTSESATPESGPGTSTEPSEGSAPGTSESATPESGPGSEPATSGSETPGTSTEPSEGSAPGTSTEPSEGSAPGTSESATPESGPGTSESATPESGPGSPAGSPTSTEEGTSESATPESGPGSEPATSGSETPGTSESATPESGPGTSTEPSEGSAPGTSTEPSEGSAPGTSTEPSEGSAPGTSTEPSEGSAPGTSTEPSEGSAPGTSTEPSEGSAPGSPAGSPTSTEEGTSTEPSEGSAPGTSESATPESGPGSEPATSGSETPGTSESATPESGPGSEPATSGSETPGTSESATPESGPGTSTEPSEGSAPGTSESATPESGPGSPAGSPTSTEEGSPAGSPTSTEEGSPAGSPTSTEEGTSESATPESGPGTSTEPSEGSAPGHGEGTFTSDLSKQMEEEAVRLFIEWLKNGGPSSGAPPPS

SEQ ID NO: 1847 - protein, 651 aa, Artificial Sequence
  Description of Artificial Sequence: Synthetic polypeptide
QLGPQGPPHLVADPSKKQGPWLEEEEEAYGWMDFGGSPAGSPTSTEEGTSESATPESGPGTSTEPSEGSAPGSPAGSPTSTEEGTSTEPSEGSAPGTSTEPSEGSAPGTSESATPESGPGSEPATSGSETPGSEPATSGSETPGSPAGSPTSTEEGTSESATPESGPGTSTEPSEGSAPGTSTEPSEGSAPGSPAGSPTSTEEGTSTEPSEGSAPGTSTEPSEGSAPGTSESATPESGPGTSTEPSEGSAPGTSESATPESGPGSEPATSGSETPGTSTEPSEGSAPGTSTEPSEGSAPGTSESATPESGPGTSESATPESGPGSPAGSPTSTEEGTSESATPESGPGSEPATSGSETPGTSESATPESGPGTSTEPSEGSAPGTSTEPSEGSAPGTSTEPSEGSAPGTSTEPSEGSAPGTSTEPSEGSAPGTSTEPSEGSAPGSPAGSPTSTEEGTSTEPSEGSAPGTSESATPESGPGSEPATSGSETPGTSESATPESGPGSEPATSGSETPGTSESATPESGPGTSTEPSEGSAPGTSESATPESGPGSPAGSPTSTEEGSPAGSPTSTEEGSPAGSPTSTEEGTSESATPESGPGTSTEPSEGSAPGHGEGTFTSDLSKQMEEEAVRLFIEWLKNGGPSSGAPPPS

SEQ ID NO: 1848 - protein, 639 aa, Artificial Sequence
  Description of Artificial Sequence: Synthetic polypeptide
DPSKKQGPWLEEEEEAYGWMDFGGSPAGSPTSTEEGTSESATPESGPGTSTEPSEGSAPGSPAGSPTSTEEGTSTEPSEGSAPGTSTEPSEGSAPGTSESATPESGPGSEPATSGSETPGSEPATSGSETPGSPAGSPTSTEEGTSESATPESGPGTSTEPSEGSAPGTSTEPSEGSAPGSPAGSPTSTEEGTSTEPSEGSAPGTSTEPSEGSAPGTSESATPESGPGTSTEPSEGSAPGTSESATPESGPGSEPATSGSETPGTSTEPSEGSAPGTSTEPSEGSAPGTSESATPESGPGTSESATPESGPGSPAGSPTSTEEGTSESATPESGPGSEPATSGSETPGTSESATPESGPGTSTEPSEGSAPGTSTEPSEGSAPGTSTEPSEGSAPGTSTEPSEGSAPGTSTEPSEGSAPGTSTEPSEGSAPGSPAGSPTSTEEGTSTEPSEGSAPGTSESATPESGPGSEPATSGSETPGTSESATPESGPGSEPATSGSETPGTSESATPESGPGTSTEPSEGSAPGTSESATPESGPGSPAGSPTSTEEGSPAGSPTSTEEGSPAGSPTSTEEGTSESATPESGPGTSTEPSEGSAPGHGEGTFTSDLSKQMEEEAVRLFIEWLKNGGPSSGAPPPS

SEQ ID NO: 1849 - protein, 659 aa, Artificial Sequence
  Description of Artificial Sequence: Synthetic polypeptide
YAEGTFISDYSIAMDKIHQQDFVNWLLAQKGKKNDWKHNITQGGSPAGSPTSTEEGTSESATPESGPGTSTEPSEGSAPGSPAGSPTSTEEGTSTEPSEGSAPGTSTEPSEGSAPGTSESATPESGPGSEPATSGSETPGSEPATSGSETPGSPAGSPTSTEEGTSESATPESGPGTSTEPSEGSAPGTSTEPSEGSAPGSPAGSPTSTEEGTSTEPSEGSAPGTSTEPSEGSAPGTSESATPESGPGTSTEPSEGSAPGTSESATPESGPGSEPATSGSETPGTSTEPSEGSAPGTSTEPSEGSAPGTSESATPESGPGTSESATPESGPGSPAGSPTSTEEGTSESATPESGPGSEPATSGSETPGTSESATPESGPGTSTEPSEGSAPGTSTEPSEGSAPGTSTEPSEGSAPGTSTEPSEGSAPGTSTEPSEGSAPGTSTEPSEGSAPGSPAGSPTSTEEGTSTEPSEGSAPGTSESATPESGPGSEPATSGSETPGTSESATPESGPGSEPATSGSETPGTSESATPESGPGTSTEPSEGSAPGTSESATPESGPGSPAGSPTSTEEGSPAGSPTSTEEGSPAGSPTSTEEGTSESATPESGPGTSTEPSEGSAPGHGEGTFTSDLSKQMEEEAVRLFIEWLKNGGPSSGAPPPS

SEQ ID NO: 1850 - protein, 646 aa, Artificial Sequence
  Description of Artificial Sequence: Synthetic polypeptide
HSQGTFTSDYSKYLDSRRAQDFVQWLMNTGGSPAGSPTSTEEGTSESATPESGPGTSTEPSEGSAPGSPAGSPTSTEEGTSTEPSEGSAPGTSTEPSEGSAPGTSESATPESGPGSEPATSGSETPGSEPATSGSETPGSPAGSPTSTEEGTSESATPESGPGTSTEPSEGSAPGTSTEPSEGSAPGSPAGSPTSTEEGTSTEPSEGSAPGTSTEPSEGSAPGTSESATPESGPGTSTEPSEGSAPGTSESATPESGPGSEPATSGSETPGTSTEPSEGSAPGTSTEPSEGSAPGTSESATPESGPGTSESATPESGPGSPAGSPTSTEEGTSESATPESGPGSEPATSGSETPGTSESATPESGPGTSTEPSEGSAPGTSTEPSEGSAPGTSTEPSEGSAPGTSTEPSEGSAPGTSTEPSEGSAPGTSTEPSEGSAPGSPAGSPTSTEEGTSTEPSEGSAPGTSESATPESGPGSEPATSGSETPGTSESATPESGPGSEPATSGSETPGTSESATPESGPGTSTEPSEGSAPGTSESATPESGPGSPAGSPTSTEEGSPAGSPTSTEEGSPAGSPTSTEEGTSESATPESGPGTSTEPSEGSAPGHGEGTFTSDLSKQMEEEAVRLFIEWLKNGGPSSGAPPPS

SEQ ID NO: 1851 - protein, 654 aa, Artificial Sequence
  Description of Artificial Sequence: Synthetic polypeptide
HDEFERHAEGTFTSDVSSTLEGQAALEFIAWLVKGRGGGSPAGSPTSTEEGTSESATPESGPGTSTEPSEGSAPGSPAGSPTSTEEGTSTEPSEGSAPGTSTEPSEGSAPGTSESATPESGPGSEPATSGSETPGSEPATSGSETPGSPAGSPTSTEEGTSESATPESGPGTSTEPSEGSAPGTSTEPSEGSAPGSPAGSPTSTEEGTSTEPSEGSAPGTSTEPSEGSAPGTSESATPESGPGTSTEPSEGSAPGTSESATPESGPGSEPATSGSETPGTSTEPSEGSAPGTSTEPSEGSAPGTSESATPESGPGTSESATPESGPGSPAGSPTSTEEGTSESATPESGPGSEPATSGSETPGTSESATPESGPGTSTEPSEGSAPGTSTEPSEGSAPGTSTEPSEGSAPGTSTEPSEGSAPGTSTEPSEGSAPGTSTEPSEGSAPGSPAGSPTSTEEGTSTEPSEGSAPGTSESATPESGPGSEPATSGSETPGTSESATPESGPGSEPATSGSETPGTSESATPESGPGTSTEPSEGSAPGTSESATPESGPGSPAGSPTSTEEGSPAGSPTSTEEGSPAGSPTSTEEGTSESATPESGPGTSTEPSEGSAPGHGEGTFTSDLSKQMEEEAVRLFIEWLKNGGPSSGAPPPS

SEQ ID NO: 1852 - protein, 647 aa, Artificial Sequence
  Description of Artificial Sequence: Synthetic polypeptide
HAEGTFTSDVSSYLEGQAALEFIAWLVKGRGGSPAGSPTSTEEGTSESATPESGPGTSTEPSEGSAPGSPAGSPTSTEEGTSTEPSEGSAPGTSTEPSEGSAPGTSESATPESGPGSEPATSGSETPGSEPATSGSETPGSPAGSPTSTEEGTSESATPESGPGTSTEPSEGSAPGTSTEPSEGSAPGSPAGSPTSTEEGTSTEPSEGSAPGTSTEPSEGSAPGTSESATPESGPGTSTEPSEGSAPGTSESATPESGPGSEPATSGSETPGTSTEPSEGSAPGTSTEPSEGSAPGTSESATPESGPGTSESATPESGPGSPAGSPTSTEEGTSESATPESGPGSEPATSGSETPGTSESATPESGPGTSTEPSEGSAPGTSTEPSEGSAPGTSTEPSEGSAPGTSTEPSEGSAPGTSTEPSEGSAPGTSTEPSEGSAPGSPAGSPTSTEEGTSTEPSEGSAPGTSESATPESGPGSEPATSGSETPGTSESATPESGPGSEPATSGSETPGTSESATPESGPGTSTEPSEGSAPGTSESATPESGPGSPAGSPTSTEEGSPAGSPTSTEEGSPAGSPTSTEEGTSESATPESGPGTSTEPSEGSAPGHGEGTFTSDLSKQMEEEAVRLFIEWLKNGGPSSGAPPPS

SEQ ID NO: 1853 - protein, 650 aa, Artificial Sequence
  Description of Artificial Sequence: Synthetic polypeptide
HADGSFSDEMNTILDNLAARDFINWLIETKITDGGSPAGSPTSTEEGTSESATPESGPGTSTEPSEGSAPGSPAGSPTSTEEGTSTEPSEGSAPGTSTEPSEGSAPGTSESATPESGPGSEPATSGSETPGSEPATSGSETPGSPAGSPTSTEEGTSESATPESGPGTSTEPSEGSAPGTSTEPSEGSAPGSPAGSPTSTEEGTSTEPSEGSAPGTSTEPSEGSAPGTSESATPESGPGTSTEPSEGSAPGTSESATPESGPGSEPATSGSETPGTSTEPSEGSAPGTSTEPSEGSAPGTSESATPESGPGTSESATPESGPGSPAGSPTSTEEGTSESATPESGPGSEPATSGSETPGTSESATPESGPGTSTEPSEGSAPGTSTEPSEGSAPGTSTEPSEGSAPGTSTEPSEGSAPGTSTEPSEGSAPGTSTEPSEGSAPGSPAGSPTSTEEGTSTEPSEGSAPGTSESATPESGPGSEPATSGSETPGTSESATPESGPGSEPATSGSETPGTSESATPESGPGTSTEPSEGSAPGTSESATPESGPGSPAGSPTSTEEGSPAGSPTSTEEGSPAGSPTSTEEGTSESATPESGPGTSTEPSEGSAPGHGEGTFTSDLSKQMEEEAVRLFIEWLKNGGPSSGAPPPS

SEQ ID NO: 1854 - protein, 687 aa, Artificial Sequence
  Description of Artificial Sequence: Synthetic polypeptide
GPETLCGAELVDALQFVCGDRGFYFNKPTGYGSSSRRAPQTGIVDECCFRSCDLRRLEMYCAPLKPAKSAGGSPAGSPTSTEEGTSESATPESGPGTSTEPSEGSAPGSPAGSPTSTEEGTSTEPSEGSAPGTSTEPSEGSAPGTSESATPESGPGSEPATSGSETPGSEPATSGSETPGSPAGSPTSTEEGTSESATPESGPGTSTEPSEGSAPGTSTEPSEGSAPGSPAGSPTSTEEGTSTEPSEGSAPGTSTEPSEGSAPGTSESATPESGPGTSTEPSEGSAPGTSESATPESGPGSEPATSGSETPGTSTEPSEGSAPGTSTEPSEGSAPGTSESATPESGPGTSESATPESGPGSPAGSPTSTEEGTSESATPESGPGSEPATSGSETPGTSESATPESGPGTSTEPSEGSAPGTSTEPSEGSAPGTSTEPSEGSAPGTSTEPSEGSAPGTSTEPSEGSAPGTSTEPSEGSAPGSPAGSPTSTEEGTSTEPSEGSAPGTSESATPESGPGSEPATSGSETPGTSESATPESGPGSEPATSGSETPGTSESATPESGPGTSTEPSEGSAPGTSESATPESGPGSPAGSPTSTEEGSPAGSPTSTEEGSPAGSPTSTEEGTSESATPESGPGTSTEPSEGSAPGHGEGTFTSDLSKQMEEEAVRLFIEWLKNGGPSSGAPPPS

SEQ ID NO: 1855 - protein, 684 aa, Artificial Sequence
  Description of Artificial Sequence: Synthetic polypeptide
AYRPSETLCGGELVDTLQFVCGDRGFYFSRPASRVSRRSRGIVEECCFRSCDLALLETYCATPAKSEGGSPAGSPTSTEEGTSESATPESGPGTSTEPSEGSAPGSPAGSPTSTEEGTSTEPSEGSAPGTSTEPSEGSAPGTSESATPESGPGSEPATSGSETPGSEPATSGSETPGSPAGSPTSTEEGTSESATPESGPGTSTEPSEGSAPGTSTEPSEGSAPGSPAGSPTSTEEGTSTEPSEGSAPGTSTEPSEGSAPGTSESATPESGPGTSTEPSEGSAPGTSESATPESGPGSEPATSGSETPGTSTEPSEGSAPGTSTEPSEGSAPGTSESATPESGPGTSESATPESGPGSPAGSPTSTEEGTSESATPESGPGSEPATSGSETPGTSESATPESGPGTSTEPSEGSAPGTSTEPSEGSAPGTSTEPSEGSAPGTSTEPSEGSAPGTSTEPSEGSAPGTSTEPSEGSAPGSPAGSPTSTEEGTSTEPSEGSAPGTSESATPESGPGSEPATSGSETPGTSESATPESGPGSEPATSGSETPGTSESATPESGPGTSTEPSEGSAPGTSESATPESGPGSPAGSPTSTEEGSPAGSPTSTEEGSPAGSPTSTEEGTSESATPESGPGTSTEPSEGSAPGHGEGTFTSDLSKQMEEEAVRLFIEWLKNGGPSSGAPPPS

SEQ ID NO: 1856 - protein, 766 aa, Artificial Sequence
  Description of Artificial Sequence: Synthetic polypeptide
EESQKKLPSSRITCPQGSVAYGSYCYSLILIPQTWSNAELSCQMHFSGHLAFLLSTGEITFVSSLVKNSLTAYQYIWIGLHDPSHGTLPNGSGWKWSSSNVLTFYNWERNPSIAADRGYCAVLSQKSGFQKWRDFNCENELPYICKFKVGGSPAGSPTSTEEGTSESATPESGPGTSTEPSEGSAPGSPAGSPTSTEEGTSTEPSEGSAPGTSTEPSEGSAPGTSESATPESGPGSEPATSGSETPGSEPATSGSETPGSPAGSPTSTEEGTSESATPESGPGTSTEPSEGSAPGTSTEPSEGSAPGSPAGSPTSTEEGTSTEPSEGSAPGTSTEPSEGSAPGTSESATPESGPGTSTEPSEGSAPGTSESATPESGPGSEPATSGSETPGTSTEPSEGSAPGTSTEPSEGSAPGTSESATPESGPGTSESATPESGPGSPAGSPTSTEEGTSESATPESGPGSEPATSGSETPGTSESATPESGPGTSTEPSEGSAPGTSTEPSEGSAPGTSTEPSEGSAPGTSTEPSEGSAPGTSTEPSEGSAPGTSTEPSEGSAPGSPAGSPTSTEEGTSTEPSEGSAPGTSESATPESGPGSEPATSGSETPGTSESATPESGPGSEPATSGSETPGTSESATPESGPGTSTEPSEGSAPGTSESATPESGPGSPAGSPTSTEEGSPAGSPTSTEEGSPAGSPTSTEEGTSESATPESGPGTSTEPSEGSAPGHGEGTFTSDLSKQMEEEAVRLFIEWLKNGGPSSGAPPPS

SEQ ID NO: 1857 - protein, 664 aa, Artificial Sequence
  Description of Artificial Sequence: Synthetic polypeptide
TQAQLLRVGCVLGTCQVQNLSHRLWQLMGPAGRQDSAPVDPSSPHSYGGSPAGSPTSTEEGTSESATPESGPGTSTEPSEGSAPGSPAGSPTSTEEGTSTEPSEGSAPGTSTEPSEGSAPGTSESATPESGPGSEPATSGSETPGSEPATSGSETPGSPAGSPTSTEEGTSESATPESGPGTSTEPSEGSAPGTSTEPSEGSAPGSPAGSPTSTEEGTSTEPSEGSAPGTSTEPSEGSAPGTSESATPESGPGTSTEPSEGSAPGTSESATPESGPGSEPATSGSETPGTSTEPSEGSAPGTSTEPSEGSAPGTSESATPESGPGTSESATPESGPGSPAGSPTSTEEGTSESATPESGPGSEPATSGSETPGTSESATPESGPGTSTEPSEGSAPGTSTEPSEGSAPGTSTEPSEGSAPGTSTEPSEGSAPGTSTEPSEGSAPGTSTEPSEGSAPGSPAGSPTSTEEGTSTEPSEGSAPGTSESATPESGPGSEPATSGSETPGTSESATPESGPGSEPATSGSETPGTSESATPESGPGTSTEPSEGSAPGTSESATPESGPGSPAGSPTSTEEGSPAGSPTSTEEGSPAGSPTSTEEGTSESATPESGPGTSTEPSEGSAPGHGEGTFTSDLSKQMEEEAVRLFIEWLKNGGPSSGAPPPS

SEQ ID NO: 1858 - protein, 763 aa, Artificial Sequence
  Description of Artificial Sequence: Synthetic polypeptide
VPIQKVQDDTKTLIKTIVTRINDISHTQSVSSKQKVTGLDFIPGLHPILTLSKMDQTLAVYQQILTSMPSRNVIQISNDLENLRDLLHVLAFSKSCHLPWASGLETLDSLGGVLEASGYSTEVVALSRLQGSLQDMLWQLDLSPGCGGSPAGSPTSTEEGTSESATPESGPGTSTEPSEGSAPGSPAGSPTSTEEGTSTEPSEGSAPGTSTEPSEGSAPGTSESATPESGPGSEPATSGSETPGSEPATSGSETPGSPAGSPTSTEEGTSESATPESGPGTSTEPSEGSAPGTSTEPSEGSAPGSPAGSPTSTEEGTSTEPSEGSAPGTSTEPSEGSAPGTSESATPESGPGTSTEPSEGSAPGTSESATPESGPGSEPATSGSETPGTSTEPSEGSAPGTSTEPSEGSAPGTSESATPESGPGTSESATPESGPGSPAGSPTSTEEGTSESATPESGPGSEPATSGSETPGTSESATPESGPGTSTEPSEGSAPGTSTEPSEGSAPGTSTEPSEGSAPGTSTEPSEGSAPGTSTEPSEGSAPGTSTEPSEGSAPGSPAGSPTSTEEGTSTEPSEGSAPGTSESATPESGPGSEPATSGSETPGTSESATPESGPGSEPATSGSETPGTSESATPESGPGTSTEPSEGSAPGTSESATPESGPGSPAGSPTSTEEGSPAGSPTSTEEGSPAGSPTSTEEGTSESATPESGPGTSTEPSEGSAPGHGEGTFTSDLSKQMEEEAVRLFIEWLKNGGPSSGAPPPS

SEQ ID NO: 1859 - protein, 1051 aa, Artificial Sequence
  Description of Artificial Sequence: Synthetic polypeptide
VPIQKVQDDTKTLIKTIVTRINDISHTQSVSSKQKVTGLDFIPGLHPILTLSKMDQTLAVYQQILTSMPSRNVIQISNDLENLRDLLHVLAFSKSCHLPWASGLETLDSLGGVLEASGYSTEVVALSRLQGSLQDMLWQLDLSPGCGGSPAGSPTSTEEGTSESATPESGPGTSTEPSEGSAPGSPAGSPTSTEEGTSTEPSEGSAPGTSTEPSEGSAPGTSESATPESGPGSEPATSGSETPGSEPATSGSETPGSPAGSPTSTEEGTSESATPESGPGTSTEPSEGSAPGTSTEPSEGSAPGSPAGSPTSTEEGTSTEPSEGSAPGTSTEPSEGSAPGTSESATPESGPGTSTEPSEGSAPGTSESATPESGPGSEPATSGSETPGTSTEPSEGSAPGTSTEPSEGSAPGTSESATPESGPGTSESATPESGPGSPAGSPTSTEEGTSESATPESGPGSEPATSGSETPGTSESATPESGPGTSTEPSEGSAPGTSTEPSEGSAPGTSTEPSEGSAPGTSTEPSEGSAPGTSTEPSEGSAPGTSTEPSEGSAPGSPAGSPTSTEEGTSTEPSEGSAPGTSESATPESGPGSEPATSGSETPGTSESATPESGPGSEPATSGSETPGTSESATPESGPGTSTEPSEGSAPGTSESATPESGPGSPAGSPTSTEEGSPAGSPTSTEEGSPAGSPTSTEEGTSESATPESGPGTSTEPSEGSAPGTSESATPESGPGSEPATSGSETPGTSESATPESGPGSEPATSGSETPGTSESATPESGPGTSTEPSEGSAPGSPAGSPTSTEEGTSESATPESGPGSEPATSGSETPGTSESATPESGPGSPAGSPTSTEEGSPAGSPTSTEEGTSTEPSEGSAPGTSESATPESGPGTSESATPESGPGTSESATPESGPGSEPATSGSETPGSEPATSGSETPGSPAGSPTSTEEGTSTEPSEGSAPGTSTEPSEGSAPGSEPATSGSETPGTSESATPESGPGTSTEPSEGSAPGHGEGTFTSDLSKQMEEEAVRLFIEWLKNGGPSSGAPPPS

SEQ ID NO: 1860 - protein, 642 aa, Artificial Sequence
  Description of Artificial Sequence: Synthetic polypeptide
FRVDEEFQSPFASQSRGYFLFRPRNGGSPAGSPTSTEEGTSESATPESGPGTSTEPSEGSAPGSPAGSPTSTEEGTSTEPSEGSAPGTSTEPSEGSAPGTSESATPESGPGSEPATSGSETPGSEPATSGSETPGSPAGSPTSTEEGTSESATPESGPGTSTEPSEGSAPGTSTEPSEGSAPGSPAGSPTSTEEGTSTEPSEGSAPGTSTEPSEGSAPGTSESATPESGPGTSTEPSEGSAPGTSESATPESGPGSEPATSGSETPGTSTEPSEGSAPGTSTEPSEGSAPGTSESATPESGPGTSESATPESGPGSPAGSPTSTEEGTSESATPESGPGSEPATSGSETPGTSESATPESGPGTSTEPSEGSAPGTSTEPSEGSAPGTSTEPSEGSAPGTSTEPSEGSAPGTSTEPSEGSAPGTSTEPSEGSAPGSPAGSPTSTEEGTSTEPSEGSAPGTSESATPESGPGSEPATSGSETPGTSESATPESGPGSEPATSGSETPGTSESATPESGPGTSTEPSEGSAPGTSESATPESGPGSPAGSPTSTEEGSPAGSPTSTEEGSPAGSPTSTEEGTSESATPESGPGTSTEPSEGSAPGHGEGTFTSDLSKQMEEEAVRLFIEWLKNGGPSSGAPPPS

SEQ ID NO: 1861 - protein, 654 aa, Artificial Sequence
  Description of Artificial Sequence: Synthetic polypeptide
HSQGTFTSDYSKYLDSRRAQDFVQWLMNTKRNRNNIAGGSPAGSPTSTEEGTSESATPESGPGTSTEPSEGSAPGSPAGSPTSTEEGTSTEPSEGSAPGTSTEPSEGSAPGTSESATPESGPGSEPATSGSETPGSEPATSGSETPGSPAGSPTSTEEGTSESATPESGPGTSTEPSEGSAPGTSTEPSEGSAPGSPAGSPTSTEEGTSTEPSEGSAPGTSTEPSEGSAPGTSESATPESGPGTSTEPSEGSAPGTSESATPESGPGSEPATSGSETPGTSTEPSEGSAPGTSTEPSEGSAPGTSESATPESGPGTSESATPESGPGSPAGSPTSTEEGTSESATPESGPGSEPATSGSETPGTSESATPESGPGTSTEPSEGSAPGTSTEPSEGSAPGTSTEPSEGSAPGTSTEPSEGSAPGTSTEPSEGSAPGTSTEPSEGSAPGSPAGSPTSTEEGTSTEPSEGSAPGTSESATPESGPGSEPATSGSETPGTSESATPESGPGSEPATSGSETPGTSESATPESGPGTSTEPSEGSAPGTSESATPESGPGSPAGSPTSTEEGSPAGSPTSTEEGSPAGSPTSTEEGTSESATPESGPGTSTEPSEGSAPGHGEGTFTSDLSKQMEEEAVRLFIEWLKNGGPSSGAPPPS

SEQ ID NO: 1862 - protein, 654 aa, Artificial Sequence
  Description of Artificial Sequence: Synthetic polypeptide
KCNTATCATNRLANFLVHSSNNFGPILPPTNVGSNTYGGSPAGSPTSTEEGTSESATPESGPGTSTEPSEGSAPGSPAGSPTSTEEGTSTEPSEGSAPGTSTEPSEGSAPGTSESATPESGPGSEPATSGSETPGSEPATSGSETPGSPAGSPTSTEEGTSESATPESGPGTSTEPSEGSAPGTSTEPSEGSAPGSPAGSPTSTEEGTSTEPSEGSAPGTSTEPSEGSAPGTSESATPESGPGTSTEPSEGSAPGTSESATPESGPGSEPATSGSETPGTSTEPSEGSAPGTSTEPSEGSAPGTSESATPESGPGTSESATPESGPGSPAGSPTSTEEGTSESATPESGPGSEPATSGSETPGTSESATPESGPGTSTEPSEGSAPGTSTEPSEGSAPGTSTEPSEGSAPGTSTEPSEGSAPGTSTEPSEGSAPGTSTEPSEGSAPGSPAGSPTSTEEGTSTEPSEGSAPGTSESATPESGPGSEPATSGSETPGTSESATPESGPGSEPATSGSETPGTSESATPESGPGTSTEPSEGSAPGTSESATPESGPGSPAGSPTSTEEGSPAGSPTSTEEGSPAGSPTSTEEGTSESATPESGPGTSTEPSEGSAPGHGEGTFTSDLSKQMEEEAVRLFIEWLKNGGPSSGAPPPS

SEQ ID NO: 1863 - protein, 653 aa, Artificial Sequence
  Description of Artificial Sequence: Synthetic polypeptide
YPIKPEAPGEDASPEELNRYYASLRHYLNLVTRQRYGGSPAGSPTSTEEGTSESATPESGPGTSTEPSEGSAPGSPAGSPTSTEEGTSTEPSEGSAPGTSTEPSEGSAPGTSESATPESGPGSEPATSGSETPGSEPATSGSETPGSPAGSPTSTEEGTSESATPESGPGTSTEPSEGSAPGTSTEPSEGSAPGSPAGSPTSTEEGTSTEPSEGSAPGTSTEPSEGSAPGTSESATPESGPGTSTEPSEGSAPGTSESATPESGPGSEPATSGSETPGTSTEPSEGSAPGTSTEPSEGSAPGTSESATPESGPGTSESATPESGPGSPAGSPTSTEEGTSESATPESGPGSEPATSGSETPGTSESATPESGPGTSTEPSEGSAPGTSTEPSEGSAPGTSTEPSEGSAPGTSTEPSEGSAPGTSTEPSEGSAPGTSTEPSEGSAPGSPAGSPTSTEEGTSTEPSEGSAPGTSESATPESGPGSEPATSGSETPGTSESATPESGPGSEPATSGSETPGTSESATPESGPGTSTEPSEGSAPGTSESATPESGPGSPAGSPTSTEEGSPAGSPTSTEEGSPAGSPTSTEEGTSESATPESGPGTSTEPSEGSAPGHGEGTFTSDLSKQMEEEAVRLFIEWLKNGGPSSGAPPPS

SEQ ID NO: 1864 - protein, 658 aa, Artificial Sequence
  Description of Artificial Sequence: Synthetic polypeptide
IVLSLDVPIGLLQILLEQARARAAREQATTNARILARVGHCGGSPAGSPTSTEEGTSESATPESGPGTSTEPSEGSAPGSPAGSPTSTEEGTSTEPSEGSAPGTSTEPSEGSAPGTSESATPESGPGSEPATSGSETPGSEPATSGSETPGSPAGSPTSTEEGTSESATPESGPGTSTEPSEGSAPGTSTEPSEGSAPGSPAGSPTSTEEGTSTEPSEGSAPGTSTEPSEGSAPGTSESATPESGPGTSTEPSEGSAPGTSESATPESGPGSEPATSGSETPGTSTEPSEGSAPGTSTEPSEGSAPGTSESATPESGPGTSESATPESGPGSPAGSPTSTEEGTSESATPESGPGSEPATSGSETPGTSESATPESGPGTSTEPSEGSAPGTSTEPSEGSAPGTSTEPSEGSAPGTSTEPSEGSAPGTSTEPSEGSAPGTSTEPSEGSAPGSPAGSPTSTEEGTSTEPSEGSAPGTSESATPESGPGSEPATSGSETPGTSESATPESGPGSEPATSGSETPGTSESATPESGPGTSTEPSEGSAPGTSESATPESGPGSPAGSPTSTEEGSPAGSPTSTEEGSPAGSPTSTEEGTSESATPESGPGTSTEPSEGSAPGHGEGTFTSDLSKQMEEEAVRLFIEWLKNGGPSSGAPPPS

SEQ ID NO: 1865 - protein, 655 aa, Artificial Sequence
  Description of Artificial Sequence: Synthetic polypeptide
FTLSLDVPTNIMNLLFNIAKAKNLRAQAAANAHLMAQIGGSPAGSPTSTEEGTSESATPESGPGTSTEPSEGSAPGSPAGSPTSTEEGTSTEPSEGSAPGTSTEPSEGSAPGTSESATPESGPGSEPATSGSETPGSEPATSGSETPGSPAGSPTSTEEGTSESATPESGPGTSTEPSEGSAPGTSTEPSEGSAPGSPAGSPTSTEEGTSTEPSEGSAPGTSTEPSEGSAPGTSESATPESGPGTSTEPSEGSAPGTSESATPESGPGSEPATSGSETPGTSTEPSEGSAPGTSTEPSEGSAPGTSESATPESGPGTSESATPESGPGSPAGSPTSTEEGTSESATPESGPGSEPATSGSETPGTSESATPESGPGTSTEPSEGSAPGTSTEPSEGSAPGTSTEPSEGSAPGTSTEPSEGSAPGTSTEPSEGSAPGTSTEPSEGSAPGSPAGSPTSTEEGTSTEPSEGSAPGTSESATPESGPGSEPATSGSETPGTSESATPESGPGSEPATSGSETPGTSESATPESGPGTSTEPSEGSAPGTSESATPESGPGSPAGSPTSTEEGSPAGSPTSTEEGSPAGSPTSTEEGTSESATPESGPGTSTEPSEGSAPGHGEGTFTSDLSKQMEEEAVRLFIEWLKNGGPSSGAPPPS

SEQ ID NO: 1866 - protein, 1003 aa, Artificial Sequence
  Description of Artificial Sequence: Synthetic polypeptide
MRSGCVVVHVWILAGLWLAVAGRPLAFSDAGPHVHYGWGDPIRLRHLYTSGPHGLSSCFLRIRADGVVDCARGQSAHSLLEIKAVALRTVAIKGVHSVRYLCMGADGKMQGLLQYSEEDCAFEEEIRPDGYNVYRSEKHRLPVSLSSAKQRQLYKNRGFLPLSHFLPMLPMVPEEPEDLRGHLESDMFSSPLETDSMDPFGLVTGLEAVRSPSFEKGGSPAGSPTSTEEGTSESATPESGPGTSTEPSEGSAPGSPAGSPTSTEEGTSTEPSEGSAPGTSTEPSEGSAPGTSESATPESGPGSEPATSGSETPGSEPATSGSETPGSPAGSPTSTEEGTSESATPESGPGTSTEPSEGSAPGTSTEPSEGSAPGSPAGSPTSTEEGTSTEPSEGSAPGTSTEPSEGSAPGTSESATPESGPGTSTEPSEGSAPGTSESATPESGPGSEPATSGSETPGTSTEPSEGSAPGTSTEPSEGSAPGTSESATPESGPGTSESATPESGPGSPAGSPTSTEEGTSESATPESGPGSEPATSGSETPGTSESATPESGPGTSTEPSEGSAPGTSTEPSEGSAPGTSTEPSEGSAPGTSTEPSEGSAPGTSTEPSEGSAPGTSTEPSEGSAPGSPAGSPTSTEEGTSTEPSEGSAPGTSESATPESGPGSEPATSGSETPGTSESATPESGPGSEPATSGSETPGTSESATPESGPGTSTEPSEGSAPGTSESATPESGPGSPAGSPTSTEEGSPAGSPTSTEEGSPAGSPTSTEEGTSESATPESGPGTSTEPSEGSAPGMDSDETGFEHSGLWVSVLAGLLLGACQAHPIPDSSPLLQFGGQVRQRYLYTDDAQQTEAHLEIREDGTVGGAADQSPESLLQLKALKPGVIQILGVKTSRFLCQRPDGALYGSLHFDPEACSFRELLLEDGYNVYQSEAHGLPLHLPGNKSPHRDPAPRGPARFLPLPGLPPALPEPPGILAPQPPDVGSSDPLSMVGPSQGRSPSYAS

SEQ ID NO: 1867 - protein, 828 aa, Artificial Sequence
  Description of Artificial Sequence: Synthetic polypeptide
MRSGCVVVHVWILAGLWLAVAGRPLAFSDAGPHVHYGWGDPIRLRHLYTSGPHGLSSCFLRIRADGVVDCARGQSAHSLLEIKAVALRTVAIKGVHSVRYLCMGADGKMQGLLQYSEEDCAFEEEIRPDGYNVYRSEKHRLPVSLSSAKQRQLYKNRGFLPLSHFLPMLPMVPEEPEDLRGHLESDMFSSPLETDSMDPFGLVTGLEAVRSPSFEKGGSPAGSPTSTEEGTSESATPESGPGTSTEPSEGSAPGSPAGSPTSTEEGTSTEPSEGSAPGTSTEPSEGSAPGTSESATPESGPGSEPATSGSETPGSEPATSGSETPGSPAGSPTSTEEGTSESATPESGPGTSTEPSEGSAPGTSTEPSEGSAPGSPAGSPTSTEEGTSTEPSEGSAPGTSTEPSEGSAPGTSESATPESGPGTSTEPSEGSAPGTSESATPESGPGSEPATSGSETPGTSTEPSEGSAPGTSTEPSEGSAPGTSESATPESGPGTSESATPESGPGSPAGSPTSTEEGTSESATPESGPGSEPATSGSETPGTSESATPESGPGTSTEPSEGSAPGTSTEPSEGSAPGTSTEPSEGSAPGTSTEPSEGSAPGTSTEPSEGSAPGTSTEPSEGSAPGSPAGSPTSTEEGTSTEPSEGSAPGTSESATPESGPGSEPATSGSETPGTSESATPESGPGSEPATSGSETPGTSESATPESGPGTSTEPSEGSAPGTSESATPESGPGSPAGSPTSTEEGSPAGSPTSTEEGSPAGSPTSTEEGTSESATPESGPGTSTEPSEGSAPGQLGPQGPPHLVADPSKKQGPWLEEEEEAYGWMDF

SEQ ID NO: 1868 - protein, 816 aa, Artificial Sequence
  Description of Artificial Sequence: Synthetic polypeptide
MRSGCVVVHVWILAGLWLAVAGRPLAFSDAGPHVHYGWGDPIRLRHLYTSGPHGLSSCFLRIRADGVVDCARGQSAHSLLEIKAVALRTVAIKGVHSVRYLCMGADGKMQGLLQYSEEDCAFEEEIRPDGYNVYRSEKHRLPVSLSSAKQRQLYKNRGFLPLSHFLPMLPMVPEEPEDLRGHLESDMFSSPLETDSMDPFGLVTGLEAVRSPSFEKGGSPAGSPTSTEEGTSESATPESGPGTSTEPSEGSAPGSPAGSPTSTEEGTSTEPSEGSAPGTSTEPSEGSAPGTSESATPESGPGSEPATSGSETPGSEPATSGSETPGSPAGSPTSTEEGTSESATPESGPGTSTEPSEGSAPGTSTEPSEGSAPGSPAGSPTSTEEGTSTEPSEGSAPGTSTEPSEGSAPGTSESATPESGPGTSTEPSEGSAPGTSESATPESGPGSEPATSGSETPGTSTEPSEGSAPGTSTEPSEGSAPGTSESATPESGPGTSESATPESGPGSPAGSPTSTEEGTSESATPESGPGSEPATSGSETPGTSESATPESGPGTSTEPSEGSAPGTSTEPSEGSAPGTSTEPSEGSAPGTSTEPSEGSAPGTSTEPSEGSAPGTSTEPSEGSAPGSPAGSPTSTEEGTSTEPSEGSAPGTSESATPESGPGSEPATSGSETPGTSESATPESGPGSEPATSGSETPGTSESATPESGPGTSTEPSEGSAPGTSESATPESGPGSPAGSPTSTEEGSPAGSPTSTEEGSPAGSPTSTEEGTSESATPESGPGTSTEPSEGSAPGDPSKKQGPWLEEEEEAYGWMDF

SEQ ID NO: 1869 - protein, 836 aa, Artificial Sequence
  Description of Artificial Sequence: Synthetic polypeptide
MRSGCVVVHVWILAGLWLAVAGRPLAFSDAGPHVHYGWGDPIRLRHLYTSGPHGLSSCFLRIRADGVVDCARGQSAHSLLEIKAVALRTVAIKGVHSVRYLCMGADGKMQGLLQYSEEDCAFEEEIRPDGYNVYRSEKHRLPVSLSSAKQRQLYKNRGFLPLSHFLPMLPMVPEEPEDLRGHLESDMFSSPLETDSMDPFGLVTGLEAVRSPSFEKGGSPAGSPTSTEEGTSESATPESGPGTSTEPSEGSAPGSPAGSPTSTEEGTSTEPSEGSAPGTSTEPSEGSAPGTSESATPESGPGSEPATSGSETPGSEPATSGSETPGSPAGSPTSTEEGTSESATPESGPGTSTEPSEGSAPGTSTEPSEGSAPGSPAGSPTSTEEGTSTEPSEGSAPGTSTEPSEGSAPGTSESATPESGPGTSTEPSEGSAPGTSESATPESGPGSEPATSGSETPGTSTEPSEGSAPGTSTEPSEGSAPGTSESATPESGPGTSESATPESGPGSPAGSPTSTEEGTSESATPESGPGSEPATSGSETPGTSESATPESGPGTSTEPSEGSAPGTSTEPSEGSAPGTSTEPSEGSAPGTSTEPSEGSAPGTSTEPSEGSAPGTSTEPSEGSAPGSPAGSPTSTEEGTSTEPSEGSAPGTSESATPESGPGSEPATSGSETPGTSESATPESGPGSEPATSGSETPGTSESATPESGPGTSTEPSEGSAPGTSESATPESGPGSPAGSPTSTEEGSPAGSPTSTEEGSPAGSPTSTEEGTSESATPESGPGTSTEPSEGSAPGYAEGTFISDYSIAMDKIHQQDFVNWLLAQKGKKNDWKHNITQ

SEQ ID NO: 1870 - protein, 823 aa, Artificial Sequence
  Description of Artificial Sequence: Synthetic polypeptide
MRSGCVVVHVWILAGLWLAVAGRPLAFSDAGPHVHYGWGDPIRLRHLYTSGPHGLSSCFLRIRADGVVDCARGQSAHSLLEIKAVALRTVAIKGVHSVRYLCMGADGKMQGLLQYSEEDCAFEEEIRPDGYNVYRSEKHRLPVSLSSAKQRQLYKNRGFLPLSHFLPMLPMVPEEPEDLRGHLESDMFSSPLETDSMDPFGLVTGLEAVRSPSFEKGGSPAGSPTSTEEGTSESATPESGPGTSTEPSEGSAPGSPAGSPTSTEEGTSTEPSEGSAPGTSTEPSEGSAPGTSESATPESGPGSEPATSGSETPGSEPATSGSETPGSPAGSPTSTEEGTSESATPESGPGTSTEPSEGSAPGTSTEPSEGSAPGSPAGSPTSTEEGTSTEPSEGSAPGTSTEPSEGSAPGTSESATPESGPGTSTEPSEGSAPGTSESATPESGPGSEPATSGSETPGTSTEPSEGSAPGTSTEPSEGSAPGTSESATPESGPGTSESATPESGPGSPAGSPTSTEEGTSESATPESGPGSEPATSGSETPGTSESATPESGPGTSTEPSEGSAPGTSTEPSEGSAPGTSTEPSEGSAPGTSTEPSEGSAPGTSTEPSEGSAPGTSTEPSEGSAPGSPAGSPTSTEEGTSTEPSEGSAPGTSESATPESGPGSEPATSGSETPGTSESATPESGPGSEPATSGSETPGTSESATPESGPGTSTEPSEGSAPGTSESATPESGPGSPAGSPTSTEEGSPAGSPTSTEEGSPAGSPTSTEEGTSESATPESGPGTSTEPSEGSAPGHSQGTFTSDYSKYLDSRRAQDFVQWLMNT

SEQ ID NO: 1871 - protein, 831 aa, Artificial Sequence
  Description of Artificial Sequence: Synthetic polypeptide
MRSGCVVVHVWILAGLWLAVAGRPLAFSDAGPHVHYGWGDPIRLRHLYTSGPHGLSSCFLRIRADGVVDCARGQSAHSLLEIKAVALRTVAIKGVHSVRYLCMGADGKMQGLLQYSEEDCAFEEEIRPDGYNVYRSEKHRLPVSLSSAKQRQLYKNRGFLPLSHFLPMLPMVPEEPEDLRGHLESDMFSSPLETDSMDPFGLVTGLEAVRSPSFEKGGSPAGSPTSTEEGTSESATPESGPGTSTEPSEGSAPGSPAGSPTSTEEGTSTEPSEGSAPGTSTEPSEGSAPGTSESATPESGPGSEPATSGSETPGSEPATSGSETPGSPAGSPTSTEEGTSESATPESGPGTSTEPSEGSAPGTSTEPSEGSAPGSPAGSPTSTEEGTSTEPSEGSAPGTSTEPSEGSAPGTSESATPESGPGTSTEPSEGSAPGTSESATPESGPGSEPATSGSETPGTSTEPSEGSAPGTSTEPSEGSAPGTSESATPESGPGTSESATPESGPGSPAGSPTSTEEGTSESATPESGPGSEPATSGSETPGTSESATPESGPGTSTEPSEGSAPGTSTEPSEGSAPGTSTEPSEGSAPGTSTEPSEGSAPGTSTEPSEGSAPGTSTEPSEGSAPGSPAGSPTSTEEGTSTEPSEGSAPGTSESATPESGPGSEPATSGSETPGTSESATPESGPGSEPATSGSETPGTSESATPESGPGTSTEPSEGSAPGTSESATPESGPGSPAGSPTSTEEGSPAGSPTSTEEGSPAGSPTSTEEGTSESATPESGPGTSTEPSEGSAPGHDEFERHAEGTFTSDVSSTLEGQAALEFIAWLVKGRG

SEQ ID NO: 1872 - protein, 824 aa, Artificial Sequence
  Description of Artificial Sequence: Synthetic polypeptide
MRSGCVVVHVWILAGLWLAVAGRPLAFSDAGPHVHYGWGDPIRLRHLYTSGPHGLSSCFLRIRADGVVDCARGQSAHSLLEIKAVALRTVAIKGVHSVRYLCMGADGKMQGLLQYSEEDCAFEEEIRPDGYNVYRSEKHRLPVSLSSAKQRQLYKNRGFLPLSHFLPMLPMVPEEPEDLRGHLESDMFSSPLETDSMDPFGLVTGLEAVRSPSFEKGGSPAGSPTSTEEGTSESATPESGPGTSTEPSEGSAPGSPAGSPTSTEEGTSTEPSEGSAPGTSTEPSEGSAPGTSESATPESGPGSEPATSGSETPGSEPATSGSETPGSPAGSPTSTEEGTSESATPESGPGTSTEPSEGSAPGTSTEPSEGSAPGSPAGSPTSTEEGTSTEPSEGSAPGTSTEPSEGSAPGTSESATPESGPGTSTEPSEGSAPGTSESATPESGPGSEPATSGSETPGTSTEPSEGSAPGTSTEPSEGSAPGTSESATPESGPGTSESATPESGPGSPAGSPTSTEEGTSESATPESGPGSEPATSGSETPGTSESATPESGPGTSTEPSEGSAPGTSTEPSEGSAPGTSTEPSEGSAPGTSTEPSEGSAPGTSTEPSEGSAPGTSTEPSEGSAPGSPAGSPTSTEEGTSTEPSEGSAPGTSESATPESGPGSEPATSGSETPGTSESATPESGPGSEPATSGSETPGTSESATPESGPGTSTEPSEGSAPGTSESATPESGPGSPAGSPTSTEEGSPAGSPTSTEEGSPAGSPTSTEEGTSESATPESGPGTSTEPSEGSAPGHAEGTFTSDVSSYLEGQAALEFIAWLVKGR

SEQ ID NO: 1873 - protein, 827 aa, Artificial Sequence
  Description of Artificial Sequence: Synthetic polypeptide
MRSGCVVVHVWILAGLWLAVAGRPLAFSDAGPHVHYGWGDPIRLRHLYTSGPHGLSSCFLRIRADGVVDCARGQSAHSLLEIKAVALRTVAIKGVHSVRYLCMGADGKMQGLLQYSEEDCAFEEEIRPDGYNVYRSEKHRLPVSLSSAKQRQLYKNRGFLPLSHFLPMLPMVPEEPEDLRGHLESDMFSSPLETDSMDPFGLVTGLEAVRSPSFEKGGSPAGSPTSTEEGTSESATPESGPGTSTEPSEGSAPGSPAGSPTSTEEGTSTEPSEGSAPGTSTEPSEGSAPGTSESATPESGPGSEPATSGSETPGSEPATSGSETPGSPAGSPTSTEEGTSESATPESGPGTSTEPSEGSAPGTSTEPSEGSAPGSPAGSPTSTEEGTSTEPSEGSAPGTSTEPSEGSAPGTSESATPESGPGTSTEPSEGSAPGTSESATPESGPGSEPATSGSETPGTSTEPSEGSAPGTSTEPSEGSAPGTSESATPESGPGTSESATPESGPGSPAGSPTSTEEGTSESATPESGPGSEPATSGSETPGTSESATPESGPGTSTEPSEGSAPGTSTEPSEGSAPGTSTEPSEGSAPGTSTEPSEGSAPGTSTEPSEGSAPGTSTEPSEGSAPGSPAGSPTSTEEGTSTEPSEGSAPGTSESATPESGPGSEPATSGSETPGTSESATPESGPGSEPATSGSETPGTSESATPESGPGTSTEPSEGSAPGTSESATPESGPGSPAGSPTSTEEGSPAGSPTSTEEGSPAGSPTSTEEGTSESATPESGPGTSTEPSEGSAPGHADGSFSDEMNTILDNLAARDFINWLIETKITD

SEQ ID NO: 1874 - protein, 864 aa, Artificial Sequence
  Description of Artificial Sequence: Synthetic polypeptide
MRSGCVVVHVWILAGLWLAVAGRPLAFSDAGPHVHYGWGDPIRLRHLYTSGPHGLSSCFLRIRADGVVDCARGQSAHSLLEIKAVALRTVAIKGVHSVRYLCMGADGKMQGLLQYSEEDCAFEEEIRPDGYNVYRSEKHRLPVSLSSAKQRQLYKNRGFLPLSHFLPMLPMVPEEPEDLRGHLESDMFSSPLETDSMDPFGLVTGLEAVRSPSFEKGGSPAGSPTSTEEGTSESATPESGPGTSTEPSEGSAPGSPAGSPTSTEEGTSTEPSEGSAPGTSTEPSEGSAPGTSESATPESGPGSEPATSGSETPGSEPATSGSETPGSPAGSPTSTEEGTSESATPESGPGTSTEPSEGSAPGTSTEPSEGSAPGSPAGSPTSTEEGTSTEPSEGSAPGTSTEPSEGSAPGTSESATPESGPGTSTEPSEGSAPGTSESATPESGPGSEPATSGSETPGTSTEPSEGSAPGTSTEPSEGSAPGTSESATPESGPGTSESATPESGPGSPAGSPTSTEEGTSESATPESGPGSEPATSGSETPGTSESATPESGPGTSTEPSEGSAPGTSTEPSEGSAPGTSTEPSEGSAPGTSTEPSEGSAPGTSTEPSEGSAPGTSTEPSEGSAPGSPAGSPTSTEEGTSTEPSEGSAPGTSESATPESGPGSEPATSGSETPGTSESATPESGPGSEPATSGSETPGTSESATPESGPGTSTEPSEGSAPGTSESATPESGPGSPAGSPTSTEEGSPAGSPTSTEEGSPAGSPTSTEEGTSESATPESGPGTSTEPSEGSAPGGPETLCGAELVDALQFVCGDRGFYFNKPTGYGSSSRRAPQTGIVDECCFRSCDLRRLEMYCAPLKPAKSA

SEQ ID NO: 1875 - protein, 861 aa, Artificial Sequence
  Description of Artificial Sequence: Synthetic polypeptide
MRSGCVVVHVWILAGLWLAVAGRPLAFSDAGPHVHYGWGDPIRLRHLYTSGPHGLSSCFLRIRADGVVDCARGQSAHSLLEIKAVALRTVAIKGVHSVRYLCMGADGKMQGLLQYSEEDCAFEEEIRPDGYNVYRSEKHRLPVSLSSAKQRQLYKNRGFLPLSHFLPMLPMVPEEPEDLRGHLESDMFSSPLETDSMDPFGLVTGLEAVRSPSFEKGGSPAGSPTSTEEGTSESATPESGPGTSTEPSEGSAPGSPAGSPTSTEEGTSTEPSEGSAPGTSTEPSEGSAPGTSESATPESGPGSEPATSGSETPGSEPATSGSETPGSPAGSPTSTEEGTSESATPESGPGTSTEPSEGSAPGTSTEPSEGSAPGSPAGSPTSTEEGTSTEPSEGSAPGTSTEPSEGSAPGTSESATPESGPGTSTEPSEGSAPGTSESATPESGPGSEPATSGSETPGTSTEPSEGSAPGTSTEPSEGSAPGTSESATPESGPGTSESATPESGPGSPAGSPTSTEEGTSESATPESGPGSEPATSGSETPGTSESATPESGPGTSTEPSEGSAPGTSTEPSEGSAPGTSTEPSEGSAPGTSTEPSEGSAPGTSTEPSEGSAPGTSTEPSEGSAPGSPAGSPTSTEEGTSTEPSEGSAPGTSESATPESGPGSEPATSGSETPGTSESATPESGPGSEPATSGSETPGTSESATPESGPGTSTEPSEGSAPGTSESATPESGPGSPAGSPTSTEEGSPAGSPTSTEEGSPAGSPTSTEEGTSESATPESGPGTSTEPSEGSAPGAYRPSETLCGGELVDTLQFVCGDRGFYFSRPASRVSRRSRGIVEECCFRSCDLALLETYCATPAKSE

SEQ ID NO: 1876 - protein, 943 aa, Artificial Sequence
  Description of Artificial Sequence: Synthetic polypeptide
MRSGCVVVHVWILAGLWLAVAGRPLAFSDAGPHVHYGWGDPIRLRHLYTSGPHGLSSCFLRIRADGVVDCARGQSAHSLLEIKAVALRTVAIKGVHSVRYLCMGADGKMQGLLQYSEEDCAFEEEIRPDGYNVYRSEKHRLPVSLSSAKQRQLYKNRGFLPLSHFLPMLPMVPEEPEDLRGHLESDMFSSPLETDSMDPFGLVTGLEAVRSPSFEKGGSPAGSPTSTEEGTSESATPESGPGTSTEPSEGSAPGSPAGSPTSTEEGTSTEPSEGSAPGTSTEPSEGSAPGTSESATPESGPGSEPATSGSETPGSEPATSGSETPGSPAGSPTSTEEGTSESATPESGPGTSTEPSEGSAPGTSTEPSEGSAPGSPAGSPTSTEEGTSTEPSEGSAPGTSTEPSEGSAPGTSESATPESGPGTSTEPSEGSAPGTSESATPESGPGSEPATSGSETPGTSTEPSEGSAPGTSTEPSEGSAPGTSESATPESGPGTSESATPESGPGSPAGSPTSTEEGTSESATPESGPGSEPATSGSETPGTSESATPESGPGTSTEPSEGSAPGTSTEPSEGSAPGTSTEPSEGSAPGTSTEPSEGSAPGTSTEPSEGSAPGTSTEPSEGSAPGSPAGSPTSTEEGTSTEPSEGSAPGTSESATPESGPGSEPATSGSETPGTSESATPESGPGSEPATSGSETPGTSESATPESGPGTSTEPSEGSAPGTSESATPESGPGSPAGSPTSTEEGSPAGSPTSTEEGSPAGSPTSTEEGTSESATPESGPGTSTEPSEGSAPGEESQKKLPSSRITCPQGSVAYGSYCYSLILIPQTWSNAELSCQMHFSGHLAFLLSTGEITFVSSLVKNSLTAYQYIWIGLHDPSHGTLPNGSGWKWSSSNVLTFYNWERNPSIAADRGYCAVLSQKSGFQKWRDFNCENELPYICKFKV

SEQ ID NO: 1877 - protein, 841 aa, Artificial Sequence
  Description of Artificial Sequence: Synthetic polypeptide
MRSGCVVVHVWILAGLWLAVAGRPLAFSDAGPHVHYGWGDPIRLRHLYTSGPHGLSSCFLRIRADGVVDCARGQSAHSLLEIKAVALRTVAIKGVHSVRYLCMGADGKMQGLLQYSEEDCAFEEEIRPDGYNVYRSEKHRLPVSLSSAKQRQLYKNRGFLPLSHFLPMLPMVPEEPEDLRGHLESDMFSSPLETDSMDPFGLVTGLEAVRSPSFEKGGSPAGSPTSTEEGTSESATPESGPGTSTEPSEGSAPGSPAGSPTSTEEGTSTEPSEGSAPGTSTEPSEGSAPGTSESATPESGPGSEPATSGSETPGSEPATSGSETPGSPAGSPTSTEEGTSESATPESGPGTSTEPSEGSAPGTSTEPSEGSAPGSPAGSPTSTEEGTSTEPSEGSAPGTSTEPSEGSAPGTSESATPESGPGTSTEPSEGSAPGTSESATPESGPGSEPATSGSETPGTSTEPSEGSAPGTSTEPSEGSAPGTSESATPESGPGTSESATPESGPGSPAGSPTSTEEGTSESATPESGPGSEPATSGSETPGTSESATPESGPGTSTEPSEGSAPGTSTEPSEGSAPGTSTEPSEGSAPGTSTEPSEGSAPGTSTEPSEGSAPGTSTEPSEGSAPGSPAGSPTSTEEGTSTEPSEGSAPGTSESATPESGPGSEPATSGSETPGTSESATPESGPGSEPATSGSETPGTSESATPESGPGTSTEPSEGSAPGTSESATPESGPGSPAGSPTSTEEGSPAGSPTSTEEGSPAGSPTSTEEGTSESATPESGPGTSTEPSEGSAPGTQAQLLRVGCVLGTCQVQNLSHRLWQLMGPAGRQDSAPVDPSSPHSY

SEQ ID NO: 1878 - protein, 940 aa, Artificial Sequence
  Description of Artificial Sequence: Synthetic polypeptide
MRSGCVVVHVWILAGLWLAVAGRPLAFSDAGPHVHYGWGDPIRLRHLYTSGPHGLSSCFLRIRADGVVDCARGQSAHSLLEIKAVALRTVAIKGVHSVRYLCMGADGKMQGLLQYSEEDCAFEEEIRPDGYNVYRSEKHRLPVSLSSAKQRQLYKNRGFLPLSHFLPMLPMVPEEPEDLRGHLESDMFSSPLETDSMDPFGLVTGLEAVRSPSFEKGGSPAGSPTSTEEGTSESATPESGPGTSTEPSEGSAPGSPAGSPTSTEEGTSTEPSEGSAPGTSTEPSEGSAPGTSESATPESGPGSEPATSGSETPGSEPATSGSETPGSPAGSPTSTEEGTSESATPESGPGTSTEPSEGSAPGTSTEPSEGSAPGSPAGSPTSTEEGTSTEPSEGSAPGTSTEPSEGSAPGTSESATPESGPGTSTEPSEGSAPGTSESATPESGPGSEPATSGSETPGTSTEPSEGSAPGTSTEPSEGSAPGTSESATPESGPGTSESATPESGPGSPAGSPTSTEEGTSESATPESGPGSEPATSGSETPGTSESATPESGPGTSTEPSEGSAPGTSTEPSEGSAPGTSTEPSEGSAPGTSTEPSEGSAPGTSTEPSEGSAPGTSTEPSEGSAPGSPAGSPTSTEEGTSTEPSEGSAPGTSESATPESGPGSEPATSGSETPGTSESATPESGPGSEPATSGSETPGTSESATPESGPGTSTEPSEGSAPGTSESATPESGPGSPAGSPTSTEEGSPAGSPTSTEEGSPAGSPTSTEEGTSESATPESGPGTSTEPSEGSAPGVPIQKVQDDTKTLIKTIVTRINDISHTQSVSSKQKVTGLDFIPGLHPILTLSKMDQTLAVYQQILTSMPSRNVIQISNDLENLRDLLHVLAFSKSCHLPWASGLETLDSLGGVLEASGYSTEVVALSRLQGSLQDMLWQLDLSPGC

SEQ ID NO: 1879 - protein, 819 aa, Artificial Sequence
  Description of Artificial Sequence: Synthetic polypeptide
MRSGCVVVHVWILAGLWLAVAGRPLAFSDAGPHVHYGWGDPIRLRHLYTSGPHGLSSCFLRIRADGVVDCARGQSAHSLLEIKAVALRTVAIKGVHSVRYLCMGADGKMQGLLQYSEEDCAFEEEIRPDGYNVYRSEKHRLPVSLSSAKQRQLYKNRGFLPLSHFLPMLPMVPEEPEDLRGHLESDMFSSPLETDSMDPFGLVTGLEAVRSPSFEKGGSPAGSPTSTEEGTSESATPESGPGTSTEPSEGSAPGSPAGSPTSTEEGTSTEPSEGSAPGTSTEPSEGSAPGTSESATPESGPGSEPATSGSETPGSEPATSGSETPGSPAGSPTSTEEGTSESATPESGPGTSTEPSEGSAPGTSTEPSEGSAPGSPAGSPTSTEEGTSTEPSEGSAPGTSTEPSEGSAPGTSESATPESGPGTSTEPSEGSAPGTSESATPESGPGSEPATSGSETPGTSTEPSEGSAPGTSTEPSEGSAPGTSESATPESGPGTSESATPESGPGSPAGSPTSTEEGTSESATPESGPGSEPATSGSETPGTSESATPESGPGTSTEPSEGSAPGTSTEPSEGSAPGTSTEPSEGSAPGTSTEPSEGSAPGTSTEPSEGSAPGTSTEPSEGSAPGSPAGSPTSTEEGTSTEPSEGSAPGTSESATPESGPGSEPATSGSETPGTSESATPESGPGSEPATSGSETPGTSESATPESGPGTSTEPSEGSAPGTSESATPESGPGSPAGSPTSTEEGSPAGSPTSTEEGSPAGSPTSTEEGTSESATPESGPGTSTEPSEGSAPGFRVDEEFQSPFASQSRGYFLFRPRN

SEQ ID NO: 1880 - protein, 831 aa, Artificial Sequence
  Description of Artificial Sequence: Synthetic polypeptide
MRSGCVVVHVWILAGLWLAVAGRPLAFSDAGPHVHYGWGDPIRLRHLYTSGPHGLSSCFLRIRADGVVDCARGQSAHSLLEIKAVALRTVAIKGVHSVRYLCMGADGKMQGLLQYSEEDCAFEEEIRPDGYNVYRSEKHRLPVSLSSAKQRQLYKNRGFLPLSHFLPMLPMVPEEPEDLRGHLESDMFSSPLETDSMDPFGLVTGLEAVRSPSFEKGGSPAGSPTSTEEGTSESATPESGPGTSTEPSEGSAPGSPAGSPTSTEEGTSTEPSEGSAPGTSTEPSEGSAPGTSESATPESGPGSEPATSGSETPGSEPATSGSETPGSPAGSPTSTEEGTSESATPESGPGTSTEPSEGSAPGTSTEPSEGSAPGSPAGSPTSTEEGTSTEPSEGSAPGTSTEPSEGSAPGTSESATPESGPGTSTEPSEGSAPGTSESATPESGPGSEPATSGSETPGTSTEPSEGSAPGTSTEPSEGSAPGTSESATPESGPGTSESATPESGPGSPAGSPTSTEEGTSESATPESGPGSEPATSGSETPGTSESATPESGPGTSTEPSEGSAPGTSTEPSEGSAPGTSTEPSEGSAPGTSTEPSEGSAPGTSTEPSEGSAPGTSTEPSEGSAPGSPAGSPTSTEEGTSTEPSEGSAPGTSESATPESGPGSEPATSGSETPGTSESATPESGPGSEPATSGSETPGTSESATPESGPGTSTEPSEGSAPGTSESATPESGPGSPAGSPTSTEEGSPAGSPTSTEEGSPAGSPTSTEEGTSESATPESGPGTSTEPSEGSAPGHSQGTFTSDYSKYLDSRRAQDFVQWLMNTKRNRNNIA

SEQ ID NO: 1881 - protein, 831 aa, Artificial Sequence; identical to SEQ ID NO: 1763
  Description of Artificial Sequence: Synthetic polypeptide

SEQ ID NO: 1882 - protein, 830 aa, Artificial Sequence
  Description of Artificial Sequence: Synthetic polypeptide
MRSGCVVVHVWILAGLWLAVAGRPLAFSDAGPHVHYGWGDPIRLRHLYTSGPHGLSSCFLRIRADGVVDCARGQSAHSLLEIKAVALRTVAIKGVHSVRYLCMGADGKMQGLLQYSEEDCAFEEEIRPDGYNVYRSEKHRLPVSLSSAKQRQLYKNRGFLPLSHFLPMLPMVPEEPEDLRGHLESDMFSSPLETDSMDPFGLVTGLEAVRSPSFEKGGSPAGSPTSTEEGTSESATPESGPGTSTEPSEGSAPGSPAGSPTSTEEGTSTEPSEGSAPGTSTEPSEGSAPGTSESATPESGPGSEPATSGSETPGSEPATSGSETPGSPAGSPTSTEEGTSESATPESGPGTSTEPSEGSAPGTSTEPSEGSAPGSPAGSPTSTEEGTSTEPSEGSAPGTSTEPSEGSAPGTSESATPESGPGTSTEPSEGSAPGTSESATPESGPGSEPATSGSETPGTSTEPSEGSAPGTSTEPSEGSAPGTSESATPESGPGTSESATPESGPGSPAGSPTSTEEGTSESATPESGPGSEPATSGSETPGTSESATPESGPGTSTEPSEGSAPGTSTEPSEGSAPGTSTEPSEGSAPGTSTEPSEGSAPGTSTEPSEGSAPGTSTEPSEGSAPGSPAGSPTSTEEGTSTEPSEGSAPGTSESATPESGPGSEPATSGSETPGTSESATPESGPGSEPATSGSETPGTSESATPESGPGTSTEPSEGSAPGTSESATPESGPGSPAGSPTSTEEGSPAGSPTSTEEGSPAGSPTSTEEGTSESATPESGPGTSTEPSEGSAPGYPIKPEAPGEDASPEELNRYYASLRHYLNLVTRQRY

SEQ ID NO: 1883 - protein, 835 aa, Artificial Sequence
  Description of Artificial Sequence: Synthetic polypeptide
MRSGCVVVHVWILAGLWLAVAGRPLAFSDAGPHVHYGWGDPIRLRHLYTSGPHGLSSCFLRIRADGVVDCARGQSAHSLLEIKAVALRTVAIKGVHSVRYLCMGADGKMQGLLQYSEEDCAFEEEIRPDGYNVYRSEKHRLPVSLSSAKQRQLYKNRGFLPLSHFLPMLPMVPEEPEDLRGHLESDMFSSPLETDSMDPFGLVTGLEAVRSPSFEKGGSPAGSPTSTEEGTSESATPESGPGTSTEPSEGSAPGSPAGSPTSTEEGTSTEPSEGSAPGTSTEPSEGSAPGTSESATPESGPGSEPATSGSETPGSEPATSGSETPGSPAGSPTSTEEGTSESATPESGPGTSTEPSEGSAPGTSTEPSEGSAPGSPAGSPTSTEEGTSTEPSEGSAPGTSTEPSEGSAPGTSESATPESGPGTSTEPSEGSAPGTSESATPESGPGSEPATSGSETPGTSTEPSEGSAPGTSTEPSEGSAPGTSESATPESGPGTSESATPESGPGSPAGSPTSTEEGTSESATPESGPGSEPATSGSETPGTSESATPESGPGTSTEPSEGSAPGTSTEPSEGSAPGTSTEPSEGSAPGTSTEPSEGSAPGTSTEPSEGSAPGTSTEPSEGSAPGSPAGSPTSTEEGTSTEPSEGSAPGTSESATPESGPGSEPATSGSETPGTSESATPESGPGSEPATSGSETPGTSESATPESGPGTSTEPSEGSAPGTSESATPESGPGSPAGSPTSTEEGSPAGSPTSTEEGSPAGSPTSTEEGTSESATPESGPGTSTEPSEGSAPGIVLSLDVPIGLLQILLEQARARAAREQATTNARILARVGHC

SEQ ID NO: 1884 - protein, 832 aa, Artificial Sequence
  Description of Artificial Sequence: Synthetic polypeptide
MRSGCVVVHVWILAGLWLAVAGRPLAFSDAGPHVHYGWGDPIRLRHLYTSGPHGLSSCFLRIRADGVVDCARGQSAHSLLEIKAVALRTVAIKGVHSVRYLCMGADGKMQGLLQYSEEDCAFEEEIRPDGYNVYRSEKHRLPVSLSSAKQRQLYKNRGFLPLSHFLPMLPMVPEEPEDLRGHLESDMFSSPLETDSMDPFGLVTGLEAVRSPSFEKGGSPAGSPTSTEEGTSESATPESGPGTSTEPSEGSAPGSPAGSPTSTEEGTSTEPSEGSAPGTSTEPSEGSAPGTSESATPESGPGSEPATSGSETPGSEPATSGSETPGSPAGSPTSTEEGTSESATPESGPGTSTEPSEGSAPGTSTEPSEGSAPGSPAGSPTSTEEGTSTEPSEGSAPGTSTEPSEGSAPGTSESATPESGPGTSTEPSEGSAPGTSESATPESGPGSEPATSGSETPGTSTEPSEGSAPGTSTEPSEGSAPGTSESATPESGPGTSESATPESGPGSPAGSPTSTEEGTSESATPESGPGSEPATSGSETPGTSESATPESGPGTSTEPSEGSAPGTSTEPSEGSAPGTSTEPSEGSAPGTSTEPSEGSAPGTSTEPSEGSAPGTSTEPSEGSAPGSPAGSPTSTEEGTSTEPSEGSAPGTSESATPESGPGSEPATSGSETPGTSESATPESGPGSEPATSGSETPGTSESATPESGPGTSTEPSEGSAPGTSESATPESGPGSPAGSPTSTEEGSPAGSPTSTEEGSPAGSPTSTEEGTSESATPESGPGTSTEPSEGSAPGFTLSLDVPTNIMNLLFNIAKAKNLRAQAAANAHLMAQI

SEQ ID NO: 1885 - protein, 1003 aa, Artificial Sequence
  Description of Artificial Sequence: Synthetic polypeptide
MDSDETGFEHSGLWVSVLAGLLLGACQAHPIPDSSPLLQFGGQVRQRYLYTDDAQQTEAHLEIREDGTVGGAADQSPESLLQLKALKPGVIQILGVKTSRFLCQRPDGALYGSLHFDPEACSFRELLLEDGYNVYQSEAHGLPLHLPGNKSPHRDPAPRGPARFLPLPGLPPALPEPPGILAPQPPDVGSSDPLSMVGPSQGRSPSYASGGSPAGSPTSTEEGTSESATPESGPGTSTEPSEGSAPGSPAGSPTSTEEGTSTEPSEGSAPGTSTEPSEGSAPGTSESATPESGPGSEPATSGSETPGSEPATSGSETPGSPAGSPTSTEEGTSESATPESGPGTSTEPSEGSAPGTSTEPSEGSAPGSPAGSPTSTEEGTSTEPSEGSAPGTSTEPSEGSAPGTSESATPESGPGTSTEPSEGSAPGTSESATPESGPGSEPATSGSETPGTSTEPSEGSAPGTSTEPSEGSAPGTSESATPESGPGTSESATPESGPGSPAGSPTSTEEGTSESATPESGPGSEPATSGSETPGTSESATPESGPGTSTEPSEGSAPGTSTEPSEGSAPGTSTEPSEGSAPGTSTEPSEGSAPGTSTEPSEGSAPGTSTEPSEGSAPGSPAGSPTSTEEGTSTEPSEGSAPGTSESATPESGPGSEPATSGSETPGTSESATPESGPGSEPATSGSETPGTSESATPESGPGTSTEPSEGSAPGTSESATPESGPGSPAGSPTSTEEGSPAGSPTSTEEGSPAGSPTSTEEGTSESATPESGPGTSTEPSEGSAPGMRSGCVVVHVWILAGLWLAVAGRPLAFSDAGPHVHYGWGDPIRLRHLYTSGPHGLSSCFLRIRADGVVDCARGQSAHSLLEIKAVALRTVAIKGVHSVRYLCMGADGKMQGLLQYSEEDCAFEEEIRPDGYNVYRSEKHRLPVSLSSAKQRQLYKNRGFLPLSHFLPMLPMVPEEPEDLRGHLESDMFSSPLETDSMDPFGLVTGLEAVRSPSFEK

SEQ ID NO: 1886 - protein, 828 aa, Artificial Sequence
  Description of Artificial Sequence: Synthetic polypeptide
QLGPQGPPHLVADPSKKQGPWLEEEEEAYGWMDFGGSPAGSPTSTEEGTSESATPESGPGTSTEPSEGSAPGSPAGSPTSTEEGTSTEPSEGSAPGTSTEPSEGSAPGTSESATPESGPGSEPATSGSETPGSEPATSGSETPGSPAGSPTSTEEGTSESATPESGPGTSTEPSEGSAPGTSTEPSEGSAPGSPAGSPTSTEEGTSTEPSEGSAPGTSTEPSEGSAPGTSESATPESGPGTSTEPSEGSAPGTSESATPESGPGSEPATSGSETPGTSTEPSEGSAPGTSTEPSEGSAPGTSESATPESGPGTSESATPESGPGSPAGSPTSTEEGTSESATPESGPGSEPATSGSETPGTSESATPESGPGTSTEPSEGSAPGTSTEPSEGSAPGTSTEPSEGSAPGTSTEPSEGSAPGTSTEPSEGSAPGTSTEPSEGSAPGSPAGSPTSTEEGTSTEPSEGSAPGTSESATPESGPGSEPATSGSETPGTSESATPESGPGSEPATSGSETPGTSESATPESGPGTSTEPSEGSAPGTSESATPESGPGSPAGSPTSTEEGSPAGSPTSTEEGSPAGSPTSTEEGTSESATPESGPGTSTEPSEGSAPGMRSGCVVVHVWILAGLWLAVAGRPLAFSDAGPHVHYGWGDPIRLRHLYTSGPHGLSSCFLRIRADGVVDCARGQSAHSLLEIKAVALRTVAIKGVHSVRYLCMGADGKMQGLLQYSEEDCAFEEEIRPDGYNVYRSEKHRLPVSLSSAKQRQLYKNRGFLPLSHFLPMLPMVPEEPEDLRGHLESDMFSSPLETDSMDPFGLVTGLEAVRSPSFEK

SEQ ID NO: 1887 - protein, 816 aa, Artificial Sequence
  Description of Artificial Sequence: Synthetic polypeptide
DPSKKQGPWLEEEEEAYGWMDFGGSPAGSPTSTEEGTSESATPESGPGTSTEPSEGSAPGSPAGSPTSTEEGTSTEPSEGSAPGTSTEPSEGSAPGTSESATPESGPGSEPATSGSETPGSEPATSGSETPGSPAGSPTSTEEGTSESATPESGPGTSTEPSEGSAPGTSTEPSEGSAPGSPAGSPTSTEEGTSTEPSEGSAPGTSTEPSEGSAPGTSESATPESGPGTSTEPSEGSAPGTSESATPESGPGSEPATSGSETPGTSTEPSEGSAPGTSTEPSEGSAPGTSESATPESGPGTSESATPESGPGSPAGSPTSTEEGTSESATPESGPGSEPATSGSETPGTSESATPESGPGTSTEPSEGSAPGTSTEPSEGSAPGTSTEPSEGSAPGTSTEPSEGSAPGTSTEPSEGSAPGTSTEPSEGSAPGSPAGSPTSTEEGTSTEPSEGSAPGTSESATPESGPGSEPATSGSETPGTSESATPESGPGSEPATSGSETPGTSESATPESGPGTSTEPSEGSAPGTSESATPESGPGSPAGSPTSTEEGSPAGSPTSTEEGSPAGSPTSTEEGTSESATPESGPGTSTEPSEGSAPGMRSGCVVVHVWILAGLWLAVAGRPLAFSDAGPHVHYGWGDPIRLRHLYTSGPHGLSSCFLRIRADGVVDCARGQSAHSLLEIKAVALRTVAIKGVHSVRYLCMGADGKMQGLLQYSEEDCAFEEEIRPDGYNVYRSEKHRLPVSLSSAKQRQLYKNRGFLPLSHFLPMLPMVPEEPEDLRGHLESDMFSSPLETDSMDPFGLVTGLEAVRSPSFEK

SEQ ID NO: 1888 - protein, 836 aa, Artificial Sequence
  Description of Artificial Sequence: Synthetic polypeptide
YAEGTFISDYSIAMDKIHQQDFVNWLLAQKGKKNDWKHNITQGGSPAGSPTSTEEGTSESATPESGPGTSTEPSEGSAPGSPAGSPTSTEEGTSTEPSEGSAPGTSTEPSEGSAPGTSESATPESGPGSEPATSGSETPGSEPATSGSETPGSPAGSPTSTEEGTSESATPESGPGTSTEPSEGSAPGTSTEPSEGSAPGSPAGSPTSTEEGTSTEPSEGSAPGTSTEPSEGSAPGTSESATPESGPGTSTEPSEGSAPGTSESATPESGPGSEPATSGSETPGTSTEPSEGSAPGTSTEPSEGSAPGTSESATPESGPGTSESATPESGPGSPAGSPTSTEEGTSESATPESGPGSEPATSGSETPGTSESATPESGPGTSTEPSEGSAPGTSTEPSEGSAPGTSTEPSEGSAPGTSTEPSEGSAPGTSTEPSEGSAPGTSTEPSEGSAPGSPAGSPTSTEEGTSTEPSEGSAPGTSESATPESGPGSEPATSGSETPGTSESATPESGPGSEPATSGSETPGTSESATPESGPGTSTEPSEGSAPGTSESATPESGPGSPAGSPTSTEEGSPAGSPTSTEEGSPAGSPTSTEEGTSESATPESGPGTSTEPSEGSAPGMRSGCVVVHVWILAGLWLAVAGRPLAFSDAGPHVHYGWGDPIRLRHLYTSGPHGLSSCFLRIRADGVVDCARGQSAHSLLEIKAVALRTVAIKGVHSVRYLCMGADGKMQGLLQYSEEDCAFEEEIRPDGYNVYRSEKHRLPVSLSSAKQRQLYKNRGFLPLSHFLPMLPMVPEEPEDLRGHLESDMFSSPLETDSMDPFGLVTGLEAVRSPSFEK

SEQ ID NO: 1889 - protein, 823 aa, Artificial Sequence
  Description of Artificial Sequence: Synthetic polypeptide
HSQGTFTSDYSKYLDSRRAQDFVQWLMNTGGSPAGSPTSTEEGTSESATPESGPGTSTEPSEGSAPGSPAGSPTSTEEGTSTEPSEGSAPGTSTEPSEGSAPGTSESATPESGPGSEPATSGSETPGSEPATSGSETPGSPAGSPTSTEEGTSESATPESGPGTSTEPSEGSAPGTSTEPSEGSAPGSPAGSPTSTEEGTSTEPSEGSAPGTSTEPSEGSAPGTSESATPESGPGTSTEPSEGSAPGTSESATPESGPGSEPATSGSETPGTSTEPSEGSAPGTSTEPSEGSAPGTSESATPESGPGTSESATPESGPGSPAGSPTSTEEGTSESATPESGPGSEPATSGSETPGTSESATPESGPGTSTEPSEGSAPGTSTEPSEGSAPGTSTEPSEGSAPGTSTEPSEGSAPGTSTEPSEGSAPGTSTEPSEGSAPGSPAGSPTSTEEGTSTEPSEGSAPGTSESATPESGPGSEPATSGSETPGTSESATPESGPGSEPATSGSETPGTSESATPESGPGTSTEPSEGSAPGTSESATPESGPGSPAGSPTSTEEGSPAGSPTSTEEGSPAGSPTSTEEGTSESATPESGPGTSTEPSEGSAPGMRSGCVVVHVWILAGLWLAVAGRPLAFSDAGPHVHYGWGDPIRLRHLYTSGPHGLSSCFLRIRADGVVDCARGQSAHSLLEIKAVALRTVAIKGVHSVRYLCMGADGKMQGLLQYSEEDCAFEEEIRPDGYNVYRSEKHRLPVSLSSAKQRQLYKNRGFLPLSHFLPMLPMVPEEPEDLRGHLESDMFSSPLETDSMDPFGLVTGLEAVRSPSFEK

SEQ ID NO: 1890 - protein, 831 aa, Artificial Sequence
  Description of Artificial Sequence: Synthetic polypeptide
HDEFERHAEGTFTSDVSSTLEGQAALEFIAWLVKGRGGGSPAGSPTSTEEGTSESATPESGPGTSTEPSEGSAPGSPAGSPTSTEEGTSTEPSEGSAPGTSTEPSEGSAPGTSESATPESGPGSEPATSGSETPGSEPATSGSETPGSPAGSPTSTEEGTSESATPESGPGTSTEPSEGSAPGTSTEPSEGSAPGSPAGSPTSTEEGTSTEPSEGSAPGTSTEPSEGSAPGTSESATPESGPGTSTEPSEGSAPGTSESATPESGPGSEPATSGSETPGTSTEPSEGSAPGTSTEPSEGSAPGTSESATPESGPGTSESATPESGPGSPAGSPTSTEEGTSESATPESGPGSEPATSGSETPGTSESATPESGPGTSTEPSEGSAPGTSTEPSEGSAPGTSTEPSEGSAPGTSTEPSEGSAPGTSTEPSEGSAPGTSTEPSEGSAPGSPAGSPTSTEEGTSTEPSEGSAPGTSESATPESGPGSEPATSGSETPGTSESATPESGPGSEPATSGSETPGTSESATPESGPGTSTEPSEGSAPGTSESATPESGPGSPAGSPTSTEEGSPAGSPTSTEEGSPAGSPTSTEEGTSESATPESGPGTSTEPSEGSAPGMRSGCVVVHVWILAGLWLAVAGRPLAFSDAGPHVHYGWGDPIRLRHLYTSGPHGLSSCFLRIRADGVVDCARGQSAHSLLEIKAVALRTVAIKGVHSVRYLCMGADGKMQGLLQYSEEDCAFEEEIRPDGYNVYRSEKHRLPVSLSSAKQRQLYKNRGFLPLSHFLPMLPMVPEEPEDLRGHLESDMFSSPLETDSMDPFGLVTGLEAVRSPSFEK

SEQ ID NO: 1891 - protein, 824 aa, Artificial Sequence
  Description of Artificial Sequence: Synthetic polypeptide
HAEGTFTSDVSSYLEGQAALEFIAWLVKGRGGSPAGSPTSTEEGTSESATPESGPGTSTEPSEGSAPGSPAGSPTSTEEGTSTEPSEGSAPGTSTEPSEGSAPGTSESATPESGPGSEPATSGSETPGSEPATSGSETPGSPAGSPTSTEEGTSESATPESGPGTSTEPSEGSAPGTSTEPSEGSAPGSPAGSPTSTEEGTSTEPSEGSAPGTSTEPSEGSAPGTSESATPESGPGTSTEPSEGSAPGTSESATPESGPGSEPATSGSETPGTSTEPSEGSAPGTSTEPSEGSAPGTSESATPESGPGTSESATPESGPGSPAGSPTSTEEGTSESATPESGPGSEPATSGSETPGTSESATPESGPGTSTEPSEGSAPGTSTEPSEGSAPGTSTEPSEGSAPGTSTEPSEGSAPGTSTEPSEGSAPGTSTEPSEGSAPGSPAGSPTSTEEGTSTEPSEGSAPGTSESATPESGPGSEPATSGSETPGTSESATPESGPGSEPATSGSETPGTSESATPESGPGTSTEPSEGSAPGTSESATPESGPGSPAGSPTSTEEGSPAGSPTSTEEGSPAGSPTSTEEGTSESATPESGPGTSTEPSEGSAPGMRSGCVVVHVWILAGLWLAVAGRPLAFSDAGPHVHYGWGDPIRLRHLYTSGPHGLSSCFLRIRADGVVDCARGQSAHSLLEIKAVALRTVAIKGVHSVRYLCMGADGKMQGLLQYSEEDCAFEEEIRPDGYNVYRSEKHRLPVSLSSAKQRQLYKNRGFLPLSHFLPMLPMVPEEPEDLRGHLESDMFSSPLETDSMDPFGLVTGLEAVRSPSFEK

SEQ ID NO: 1892 - protein, 827 aa, Artificial Sequence
  Description of Artificial Sequence: Synthetic polypeptide
HADGSFSDEMNTILDNLAARDFINWLIETKITDGGSPAGSPTSTEEGTSESATPESGPGTSTEPSEGSAPGSPAGSPTSTEEGTSTEPSEGSAPGTSTEPSEGSAPGTSESATPESGPGSEPATSGSETPGSEPATSGSETPGSPAGSPTSTEEGTSESATPESGPGTSTEPSEGSAPGTSTEPSEGSAPGSPAGSPTSTEEGTSTEPSEGSAPGTSTEPSEGSAPGTSESATPESGPGTSTEPSEGSAPGTSESATPESGPGSEPATSGSETPGTSTEPSEGSAPGTSTEPSEGSAPGTSESATPESGPGTSESATPESGPGSPAGSPTSTEEGTSESATPESGPGSEPATSGSETPGTSESATPESGPGTSTEPSEGSAPGTSTEPSEGSAPGTSTEPSEGSAPGTSTEPSEGSAPGTSTEPSEGSAPGTSTEPSEGSAPGSPAGSPTSTEEGTSTEPSEGSAPGTSESATPESGPGSEPATSGSETPGTSESATPESGPGSEPATSGSETPGTSESATPESGPGTSTEPSEGSAPGTSESATPESGPGSPAGSPTSTEEGSPAGSPTSTEEGSPAGSPTSTEEGTSESATPESGPGTSTEPSEGSAPGMRSGCVVVHVWILAGLWLAVAGRPLAFSDAGPHVHYGWGDPIRLRHLYTSGPHGLSSCFLRIRADGVVDCARGQSAHSLLEIKAVALRTVAIKGVHSVRYLCMGADGKMQGLLQYSEEDCAFEEEIRPDGYNVYRSEKHRLPVSLSSAKQRQLYKNRGFLPLSHFLPMLPMVPEEPEDLRGHLESDMFSSPLETDSMDPFGLVTGLEAVRSPSFEK

SEQ ID NO: 1893 - protein, 864 aa, Artificial Sequence
  Description of Artificial Sequence: Synthetic polypeptide
GPETLCGAELVDALQFVCGDRGFYFNKPTGYGSSSRRAPQTGIVDECCFRSCDLRRLEMYCAPLKPAKSAGGSPAGSPTSTEEGTSESATPESGPGTSTEPSEGSAPGSPAGSPTSTEEGTSTEPSEGSAPGTSTEPSEGSAPGTSESATPESGPGSEPATSGSETPGSEPATSGSETPGSPAGSPTSTEEGTSESATPESGPGTSTEPSEGSAPGTSTEPSEGSAPGSPAGSPTSTEEGTSTEPSEGSAPGTSTEPSEGSAPGTSESATPESGPGTSTEPSEGSAPGTSESATPESGPGSEPATSGSETPGTSTEPSEGSAPGTSTEPSEGSAPGTSESATPESGPGTSESATPESGPGSPAGSPTSTEEGTSESATPESGPGSEPATSGSETPGTSESATPESGPGTSTEPSEGSAPGTSTEPSEGSAPGTSTEPSEGSAPGTSTEPSEGSAPGTSTEPSEGSAPGTSTEPSEGSAPGSPAGSPTSTEEGTSTEPSEGSAPGTSESATPESGPGSEPATSGSETPGTSESATPESGPGSEPATSGSETPGTSESATPESGPGTSTEPSEGSAPGTSESATPESGPGSPAGSPTSTEEGSPAGSPTSTEEGSPAGSPTSTEEGTSESATPESGPGTSTEPSEGSAPGMRSGCVVVHVWILAGLWLAVAGRPLAFSDAGPHVHYGWGDPIRLRHLYTSGPHGLSSCFLRIRADGVVDCARGQSAHSLLEIKAVALRTVAIKGVHSVRYLCMGADGKMQGLLQYSEEDCAFEEEIRPDGYNVYRSEKHRLPVSLSSAKQRQLYKNRGFLPLSHFLPMLPMVPEEPEDLRGHLESDMFSSPLETDSMDPFGLVTGLEAVRSPSFEK

SEQ ID NO: 1894 - protein, 861 aa, Artificial Sequence
  Description of Artificial Sequence: Synthetic polypeptide
AYRPSETLCGGELVDTLQFVCGDRGFYFSRPASRVSRRSRGIVEECCFRSCDLALLETYCATPAKSEGGSPAGSPTSTEEGTSESATPESGPGTSTEPSEGSAPGSPAGSPTSTEEGTSTEPSEGSAPGTSTEPSEGSAPGTSESATPESGPGSEPATSGSETPGSEPATSGSETPGSPAGSPTSTEEGTSESATPESGPGTSTEPSEGSAPGTSTEPSEGSAPGSPAGSPTSTEEGTSTEPSEGSAPGTSTEPSEGSAPGTSESATPESGPGTSTEPSEGSAPGTSESATPESGPGSEPATSGSETPGTSTEPSEGSAPGTSTEPSEGSAPGTSESATPESGPGTSESATPESGPGSPAGSPTSTEEGTSESATPESGPGSEPATSGSETPGTSESATPESGPGTSTEPSEGSAPGTSTEPSEGSAPGTSTEPSEGSAPGTSTEPSEGSAPGTSTEPSEGSAPGTSTEPSEGSAPGSPAGSPTSTEEGTSTEPSEGSAPGTSESATPESGPGSEPATSGSETPGTSESATPESGPGSEPATSGSETPGTSESATPESGPGTSTEPSEGSAPGTSESATPESGPGSPAGSPTSTEEGSPAGSPTSTEEGSPAGSPTSTEEGTSESATPESGPGTSTEPSEGSAPGMRSGCVVVHVWILAGLWLAVAGRPLAFSDAGPHVHYGWGDPIRLRHLYTSGPHGLSSCFLRIRADGVVDCARGQSAHSLLEIKAVALRTVAIKGVHSVRYLCMGADGKMQGLLQYSEEDCAFEEEIRPDGYNVYRSEKHRLPVSLSSAKQRQLYKNRGFLPLSHFLPMLPMVPEEPEDLRGHLESDMFSSPLETDSMDPFGLVTGLEAVRSPSFEK

SEQ ID NO: 1895 - protein, 943 aa, Artificial Sequence
  Description of Artificial Sequence: Synthetic polypeptide
EESQKKLPSSRITCPQGSVAYGSYCYSLILIPQTWSNAELSCQMHFSGHLAFLLSTGEITFVSSLVKNSLTAYQYIWIGLHDPSHGTLPNGSGWKWSSSNVLTFYNWERNPSIAADRGYCAVLSQKSGFQKWRDFNCENELPYICKFKVGGSPAGSPTSTEEGTSESATPESGPGTSTEPSEGSAPGSPAGSPTSTEEGTSTEPSEGSAPGTSTEPSEGSAPGTSESATPESGPGSEPATSGSETPGSEPATSGSETPGSPAGSPTSTEEGTSESATPESGPGTSTEPSEGSAPGTSTEPSEGSAPGSPAGSPTSTEEGTSTEPSEGSAPGTSTEPSEGSAPGTSESATPESGPGTSTEPSEGSAPGTSESATPESGPGSEPATSGSETPGTSTEPSEGSAPGTSTEPSEGSAPGTSESATPESGPGTSESATPESGPGSPAGSPTSTEEGTSESATPESGPGSEPATSGSETPGTSESATPESGPGTSTEPSEGSAPGTSTEPSEGSAPGTSTEPSEGSAPGTSTEPSEGSAPGTSTEPSEGSAPGTSTEPSEGSAPGSPAGSPTSTEEGTSTEPSEGSAPGTSESATPESGPGSEPATSGSETPGTSESATPESGPGSEPATSGSETPGTSESATPESGPGTSTEPSEGSAPGTSESATPESGPGSPAGSPTSTEEGSPAGSPTSTEEGSPAGSPTSTEEGTSESATPESGPGTSTEPSEGSAPGMRSGCVVVHVWILAGLWLAVAGRPLAFSDAGPHVHYGWGDPIRLRHLYTSGPHGLSSCFLRIRADGVVDCARGQSAHSLLEIKAVALRTVAIKGVHSVRYLCMGADGKMQGLLQYSEEDCAFEEEIRPDGYNVYRSEKHRLPVSLSSAKQRQLYKNRGFLPLSHFLPMLPMVPEEPEDLRGHLESDMFSSPLETDSMDPFGLVTGLEAVRSPSFEK

SEQ ID NO: 1896 - protein, 841 aa, Artificial Sequence
  Description of Artificial Sequence: Synthetic polypeptide
TQAQLLRVGCVLGTCQVQNLSHRLWQLMGPAGRQDSAPVDPSSPHSYGGSPAGSPTSTEEGTSESATPESGPGTSTEPSEGSAPGSPAGSPTSTEEGTSTEPSEGSAPGTSTEPSEGSAPGTSESATPESGPGSEPATSGSETPGSEPATSGSETPGSPAGSPTSTEEGTSESATPESGPGTSTEPSEGSAPGTSTEPSEGSAPGSPAGSPTSTEEGTSTEPSEGSAPGTSTEPSEGSAPGTSESATPESGPGTSTEPSEGSAPGTSESATPESGPGSEPATSGSETPGTSTEPSEGSAPGTSTEPSEGSAPGTSESATPESGPGTSESATPESGPGSPAGSPTSTEEGTSESATPESGPGSEPATSGSETPGTSESATPESGPGTSTEPSEGSAPGTSTEPSEGSAPGTSTEPSEGSAPGTSTEPSEGSAPGTSTEPSEGSAPGTSTEPSEGSAPGSPAGSPTSTEEGTSTEPSEGSAPGTSESATPESGPGSEPATSGSETPGTSESATPESGPGSEPATSGSETPGTSESATPESGPGTSTEPSEGSAPGTSESATPESGPGSPAGSPTSTEEGSPAGSPTSTEEGSPAGSPTSTEEGTSESATPESGPGTSTEPSEGSAPGMRSGCVVVHVWILAGLWLAVAGRPLAFSDAGPHVHYGWGDPIRLRHLYTSGPHGLSSCFLRIRADGVVDCARGQSAHSLLEIKAVALRTVAIKGVHSVRYLCMGADGKMQGLLQYSEEDCAFEEEIRPDGYNVYRSEKHRLPVSLSSAKQRQLYKNRGFLPLSHFLPMLPMVPEEPEDLRGHLESDMFSSPLETDSMDPFGLVTGLEAVRSPSFEK

SEQ ID NO: 1897 - protein, 940 aa, Artificial Sequence
  Description of Artificial Sequence: Synthetic polypeptide
VPIQKVQDDTKTLIKTIVTRINDISHTQSVSSKQKVTGLDFIPGLHPILTLSKMDQTLAVYQQILTSMPSRNVIQISNDLENLRDLLHVLAFSKSCHLPWASGLETLDSLGGVLEASGYSTEVVALSRLQGSLQDMLWQLDLSPGCGGSPAGSPTSTEEGTSESATPESGPGTSTEPSEGSAPGSPAGSPTSTEEGTSTEPSEGSAPGTSTEPSEGSAPGTSESATPESGPGSEPATSGSETPGSEPATSGSETPGSPAGSPTSTEEGTSESATPESGPGTSTEPSEGSAPGTSTEPSEGSAPGSPAGSPTSTEEGTSTEPSEGSAPGTSTEPSEGSAPGTSESATPESGPGTSTEPSEGSAPGTSESATPESGPGSEPATSGSETPGTSTEPSEGSAPGTSTEPSEGSAPGTSESATPESGPGTSESATPESGPGSPAGSPTSTEEGTSESATPESGPGSEPATSGSETPGTSESATPESGPGTSTEPSEGSAPGTSTEPSEGSAPGTSTEPSEGSAPGTSTEPSEGSAPGTSTEPSEGSAPGTSTEPSEGSAPGSPAGSPTSTEEGTSTEPSEGSAPGTSESATPESGPGSEPATSGSETPGTSESATPESGPGSEPATSGSETPGTSESATPESGPGTSTEPSEGSAPGTSESATPESGPGSPAGSPTSTEEGSPAGSPTSTEEGSPAGSPTSTEEGTSESATPESGPGTSTEPSEGSAPGMRSGCVVVHVWILAGLWLAVAGRPLAFSDAGPHVHYGWGDPIRLRHLYTSGPHGLSSCFLRIRADGVVDCARGQSAHSLLEIKAVALRTVAIKGVHSVRYLCMGADGKMQGLLQYSEEDCAFEEEIRPDGYNVYRSEKHRLPVSLSSAKQRQLYKNRGFLPLSHFLPMLPMVPEEPEDLRGHLESDMFSSPLETDSMDPFGLVTGLEAVRSPSFEK

SEQ ID NO: 1898 - protein, 819 aa, Artificial Sequence
  Description of Artificial Sequence: Synthetic polypeptide
FRVDEEFQSPFASQSRGYFLFRPRNGGSPAGSPTSTEEGTSESATPESGPGTSTEPSEGSAPGSPAGSPTSTEEGTSTEPSEGSAPGTSTEPSEGSAPGTSESATPESGPGSEPATSGSETPGSEPATSGSETPGSPAGSPTSTEEGTSESATPESGPGTSTEPSEGSAPGTSTEPSEGSAPGSPAGSPTSTEEGTSTEPSEGSAPGTSTEPSEGSAPGTSESATPESGPGTSTEPSEGSAPGTSESATPESGPGSEPATSGSETPGTSTEPSEGSAPGTSTEPSEGSAPGTSESATPESGPGTSESATPESGPGSPAGSPTSTEEGTSESATPESGPGSEPATSGSETPGTSESATPESGPGTSTEPSEGSAPGTSTEPSEGSAPGTSTEPSEGSAPGTSTEPSEGSAPGTSTEPSEGSAPGTSTEPSEGSAPGSPAGSPTSTEEGTSTEPSEGSAPGTSESATPESGPGSEPATSGSETPGTSESATPESGPGSEPATSGSETPGTSESATPESGPGTSTEPSEGSAPGTSESATPESGPGSPAGSPTSTEEGSPAGSPTSTEEGSPAGSPTSTEEGTSESATPESGPGTSTEPSEGSAPGMRSGCVVVHVWILAGLWLAVAGRPLAFSDAGPHVHYGWGDPIRLRHLYTSGPHGLSSCFLRIRADGVVDCARGQSAHSLLEIKAVALRTVAIKGVHSVRYLCMGADGKMQGLLQYSEEDCAFEEEIRPDGYNVYRSEKHRLPVSLSSAKQRQLYKNRGFLPLSHFLPMLPMVPEEPEDLRGHLESDMFSSPLETDSMDPFGLVTGLEAVRSPSFEK

SEQ ID NO: 1899 - protein, 831 aa, Artificial Sequence
  Description of Artificial Sequence: Synthetic polypeptide
HSQGTFTSDYSKYLDSRRAQDFVQWLMNTKRNRNNIAGGSPAGSPTSTEEGTSESATPESGPGTSTEPSEGSAPGSPAGSPTSTEEGTSTEPSEGSAPGTSTEPSEGSAPGTSESATPESGPGSEPATSGSETPGSEPATSGSETPGSPAGSPTSTEEGTSESATPESGPGTSTEPSEGSAPGTSTEPSEGSAPGSPAGSPTSTEEGTSTEPSEGSAPGTSTEPSEGSAPGTSESATPESGPGTSTEPSEGSAPGTSESATPESGPGSEPATSGSETPGTSTEPSEGSAPGTSTEPSEGSAPGTSESATPESGPGTSESATPESGPGSPAGSPTSTEEGTSESATPESGPGSEPATSGSETPGTSESATPESGPGTSTEPSEGSAPGTSTEPSEGSAPGTSTEPSEGSAPGTSTEPSEGSAPGTSTEPSEGSAPGTSTEPSEGSAPGSPAGSPTSTEEGTSTEPSEGSAPGTSESATPESGPGSEPATSGSETPGTSESATPESGPGSEPATSGSETPGTSESATPESGPGTSTEPSEGSAPGTSESATPESGPGSPAGSPTSTEEGSPAGSPTSTEEGSPAGSPTSTEEGTSESATPESGPGTSTEPSEGSAPGMRSGCVVVHVWILAGLWLAVAGRPLAFSDAGPHVHYGWGDPIRLRHLYTSGPHGLSSCFLRIRADGVVDCARGQSAHSLLEIKAVALRTVAIKGVHSVRYLCMGADGKMQGLLQYSEEDCAFEEEIRPDGYNVYRSEKHRLPVSLSSAKQRQLYKNRGFLPLSHFLPMLPMVPEEPEDLRGHLESDMFSSPLETDSMDPFGLVTGLEAVRSPSFEK

SEQ ID NO: 1900 - protein, 831 aa, Artificial Sequence
  Description of Artificial Sequence: Synthetic polypeptide
KCNTATCATNRLANFLVHSSNNFGPILPPTNVGSNTYGGSPAGSPTSTEEGTSESATPESGPGTSTEPSEGSAPGSPAGSPTSTEEGTSTEPSEGSAPGTSTEPSEGSAPGTSESATPESGPGSEPATSGSETPGSEPATSGSETPGSPAGSPTSTEEGTSESATPESGPGTSTEPSEGSAPGTSTEPSEGSAPGSPAGSPTSTEEGTSTEPSEGSAPGTSTEPSEGSAPGTSESATPESGPGTSTEPSEGSAPGTSESATPESGPGSEPATSGSETPGTSTEPSEGSAPGTSTEPSEGSAPGTSESATPESGPGTSESATPESGPGSPAGSPTSTEEGTSESATPESGPGSEPATSGSETPGTSESATPESGPGTSTEPSEGSAPGTSTEPSEGSAPGTSTEPSEGSAPGTSTEPSEGSAPGTSTEPSEGSAPGTSTEPSEGSAPGSPAGSPTSTEEGTSTEPSEGSAPGTSESATPESGPGSEPATSGSETPGTSESATPESGPGSEPATSGSETPGTSESATPESGPGTSTEPSEGSAPGTSESATPESGPGSPAGSPTSTEEGSPAGSPTSTEEGSPAGSPTSTEEGTSESATPESGPGTSTEPSEGSAPGMRSGCVVVHVWILAGLWLAVAGRPLAFSDAGPHVHYGWGDPIRLRHLYTSGPHGLSSCFLRIRADGVVDCARGQSAHSLLEIKAVALRTVAIKGVHSVRYLCMGADGKMQGLLQYSEEDCAFEEEIRPDGYNVYRSEKHRLPVSLSSAKQRQLYKNRGFLPLSHFLPMLPMVPEEPEDLRGHLESDMFSSPLETDSMDPFGLVTGLEAVRSPSFEK

SEQ ID NO: 1901 - protein, 830 aa, Artificial Sequence
  Description of Artificial Sequence: Synthetic polypeptide
YPIKPEAPGEDASPEELNRYYASLRHYLNLVTRQRYGGSPAGSPTSTEEGTSESATPESGPGTSTEPSEGSAPGSPAGSPTSTEEGTSTEPSEGSAPGTSTEPSEGSAPGTSESATPESGPGSEPATSGSETPGSEPATSGSETPGSPAGSPTSTEEGTSESATPESGPGTSTEPSEGSAPGTSTEPSEGSAPGSPAGSPTSTEEGTSTEPSEGSAPGTSTEPSEGSAPGTSESATPESGPGTSTEPSEGSAPGTSESATPESGPGSEPATSGSETPGTSTEPSEGSAPGTSTEPSEGSAPGTSESATPESGPGTSESATPESGPGSPAGSPTSTEEGTSESATPESGPGSEPATSGSETPGTSESATPESGPGTSTEPSEGSAPGTSTEPSEGSAPGTSTEPSEGSAPGTSTEPSEGSAPGTSTEPSEGSAPGTSTEPSEGSAPGSPAGSPTSTEEGTSTEPSEGSAPGTSESATPESGPGSEPATSGSETPGTSESATPESGPGSEPATSGSETPGTSESATPESGPGTSTEPSEGSAPGTSESATPESGPGSPAGSPTSTEEGSPAGSPTSTEEGSPAGSPTSTEEGTSESATPESGPGTSTEPSEGSAPGMRSGCVVVHVWILAGLWLAVAGRPLAFSDAGPHVHYGWGDPIRLRHLYTSGPHGLSSCFLRIRADGVVDCARGQSAHSLLEIKAVALRTVAIKGVHSVRYLCMGADGKMQGLLQYSEEDCAFEEEIRPDGYNVYRSEKHRLPVSLSSAKQRQLYKNRGFLPLSHFLPMLPMVPEEPEDLRGHLESDMFSSPLETDSMDPFGLVTGLEAVRSPSFEK

SEQ ID NO: 1902 - protein, 835 aa, Artificial Sequence
  Description of Artificial Sequence: Synthetic polypeptide
IVLSLDVPIGLLQILLEQARARAAREQATTNARILARVGHCGGSPAGSPTSTEEGTSESATPESGPGTSTEPSEGSAPGSPAGSPTSTEEGTSTEPSEGSAPGTSTEPSEGSAPGTSESATPESGPGSEPATSGSETPGSEPATSGSETPGSPAGSPTSTEEGTSESATPESGPGTSTEPSEGSAPGTSTEPSEGSAPGSPAGSPTSTEEGTSTEPSEGSAPGTSTEPSEGSAPGTSESATPESGPGTSTEPSEGSAPGTSESATPESGPGSEPATSGSETPGTSTEPSEGSAPGTSTEPSEGSAPGTSESATPESGPGTSESATPESGPGSPAGSPTSTEEGTSESATPESGPGSEPATSGSETPGTSESATPESGPGTSTEPSEGSAPGTSTEPSEGSAPGTSTEPSEGSAPGTSTEPSEGSAPGTSTEPSEGSAPGTSTEPSEGSAPGSPAGSPTSTEEGTSTEPSEGSAPGTSESATPESGPGSEPATSGSETPGTSESATPESGPGSEPATSGSETPGTSESATPESGPGTSTEPSEGSAPGTSESATPESGPGSPAGSPTSTEEGSPAGSPTSTEEGSPAGSPTSTEEGTSESATPESGPGTSTEPSEGSAPGMRSGCVVVHVWILAGLWLAVAGRPLAFSDAGPHVHYGWGDPIRLRHLYTSGPHGLSSCFLRIRADGVVDCARGQSAHSLLEIKAVALRTVAIKGVHSVRYLCMGADGKMQGLLQYSEEDCAFEEEIRPDGYNVYRSEKHRLPVSLSSAKQRQLYKNRGFLPLSHFLPMLPMVPEEPEDLRGHLESDMFSSPLETDSMDPFGLVTGLEAVRSPSFEK

SEQ ID NO: 1903 - protein, 832 aa, Artificial Sequence
  Description of Artificial Sequence: Synthetic polypeptide
FTLSLDVPTNIMNLLFNIAKAKNLRAQAAANAHLMAQIGGSPAGSPTSTEEGTSESATPESGPGTSTEPSEGSAPGSPAGSPTSTEEGTSTEPSEGSAPGTSTEPSEGSAPGTSESATPESGPGSEPATSGSETPGSEPATSGSETPGSPAGSPTSTEEGTSESATPESGPGTSTEPSEGSAPGTSTEPSEGSAPGSPAGSPTSTEEGTSTEPSEGSAPGTSTEPSEGSAPGTSESATPESGPGTSTEPSEGSAPGTSESATPESGPGSEPATSGSETPGTSTEPSEGSAPGTSTEPSEGSAPGTSESATPESGPGTSESATPESGPGSPAGSPTSTEEGTSESATPESGPGSEPATSGSETPGTSESATPESGPGTSTEPSEGSAPGTSTEPSEGSAPGTSTEPSEGSAPGTSTEPSEGSAPGTSTEPSEGSAPGTSTEPSEGSAPGSPAGSPTSTEEGTSTEPSEGSAPGTSESATPESGPGSEPATSGSETPGTSESATPESGPGSEPATSGSETPGTSESATPESGPGTSTEPSEGSAPGTSESATPESGPGSPAGSPTSTEEGSPAGSPTSTEEGSPAGSPTSTEEGTSESATPESGPGTSTEPSEGSAPGMRSGCVVVHVWILAGLWLAVAGRPLAFSDAGPHVHYGWGDPIRLRHLYTSGPHGLSSCFLRIRADGVVDCARGQSAHSLLEIKAVALRTVAIKGVHSVRYLCMGADGKMQGLLQYSEEDCAFEEEIRPDGYNVYRSEKHRLPVSLSSAKQRQLYKNRGFLPLSHFLPMLPMVPEEPEDLRGHLESDMFSSPLETDSMDPFGLVTGLEAVRSPSFEK

SEQ ID NO: 1904 - protein, 821 aa, Artificial Sequence
  Description of Artificial Sequence: Synthetic polypeptide
MDSDETGFEHSGLWVSVLAGLLLGACQAHPIPDSSPLLQFGGQVRQRYLYTDDAQQTEAHLEIREDGTVGGAADQSPESLLQLKALKPGVIQILGVKTSRFLCQRPDGALYGSLHFDPEACSFRELLLEDGYNVYQSEAHGLPLHLPGNKSPHRDPAPRGPARFLPLPGLPPALPEPPGILAPQPPDVGSSDPLSMVGPSQGRSPSYASGGSPAGSPTSTEEGTSESATPESGPGTSTEPSEGSAPGSPAGSPTSTEEGTSTEPSEGSAPGTSTEPSEGSAPGTSESATPESGPGSEPATSGSETPGSEPATSGSETPGSPAGSPTSTEEGTSESATPESGPGTSTEPSEGSAPGTSTEPSEGSAPGSPAGSPTSTEEGTSTEPSEGSAPGTSTEPSEGSAPGTSESATPESGPGTSTEPSEGSAPGTSESATPESGPGSEPATSGSETPGTSTEPSEGSAPGTSTEPSEGSAPGTSESATPESGPGTSESATPESGPGSPAGSPTSTEEGTSESATPESGPGSEPATSGSETPGTSESATPESGPGTSTEPSEGSAPGTSTEPSEGSAPGTSTEPSEGSAPGTSTEPSEGSAPGTSTEPSEGSAPGTSTEPSEGSAPGSPAGSPTSTEEGTSTEPSEGSAPGTSESATPESGPGSEPATSGSETPGTSESATPESGPGSEPATSGSETPGTSESATPESGPGTSTEPSEGSAPGTSESATPESGPGSPAGSPTSTEEGSPAGSPTSTEEGSPAGSPTSTEEGTSESATPESGPGTSTEPSEGSAPGQLGPQGPPHLVADPSKKQGPWLEEEEEAYGWMDF

SEQ ID NO: 1905 - protein, 809 aa, Artificial Sequence
  Description of Artificial Sequence: Synthetic polypeptide
MDSDETGFEHSGLWVSVLAGLLLGACQAHPIPDSSPLLQFGGQVRQRYLYTDDAQQTEAHLEIREDGTVGGAADQSPESLLQLKALKPGVIQILGVKTSRFLCQRPDGALYGSLHFDPEACSFRELLLEDGYNVYQSEAHGLPLHLPGNKSPHRDPAPRGPARFLPLPGLPPALPEPPGILAPQPPDVGSSDPLSMVGPSQGRSPSYASGGSPAGSPTSTEEGTSESATPESGPGTSTEPSEGSAPGSPAGSPTSTEEGTSTEPSEGSAPGTSTEPSEGSAPGTSESATPESGPGSEPATSGSETPGSEPATSGSETPGSPAGSPTSTEEGTSESATPESGPGTSTEPSEGSAPGTSTEPSEGSAPGSPAGSPTSTEEGTSTEPSEGSAPGTSTEPSEGSAPGTSESATPESGPGTSTEPSEGSAPGTSESATPESGPGSEPATSGSETPGTSTEPSEGSAPGTSTEPSEGSAPGTSESATPESGPGTSESATPESGPGSPAGSPTSTEEGTSESATPESGPGSEPATSGSETPGTSESATPESGPGTSTEPSEGSAPGTSTEPSEGSAPGTSTEPSEGSAPGTSTEPSEGSAPGTSTEPSEGSAPGTSTEPSEGSAPGSPAGSPTSTEEGTSTEPSEGSAPGTSESATPESGPGSEPATSGSETPGTSESATPESGPGSEPATSGSETPGTSESATPESGPGTSTEPSEGSAPGTSESATPESGPGSPAGSPTSTEEGSPAGSPTSTEEGSPAGSPTSTEEGTSESATPESGPGTSTEPSEGSAPGDPSKKQGPWLEEEEEAYGWMDF

SEQ ID NO: 1906 - protein, 829 aa, Artificial Sequence
  Description of Artificial Sequence: Synthetic polypeptide
MDSDETGFEHSGLWVSVLAGLLLGACQAHPIPDSSPLLQFGGQVRQRYLYTDDAQQTEAHLEIREDGTVGGAADQSPESLLQLKALKPGVIQILGVKTSRFLCQRPDGALYGSLHFDPEACSFRELLLEDGYNVYQSEAHGLPLHLPGNKSPHRDPAPRGPARFLPLPGLPPALPEPPGILAPQPPDVGSSDPLSMVGPSQGRSPSYASGGSPAGSPTSTEEGTSESATPESGPGTSTEPSEGSAPGSPAGSPTSTEEGTSTEPSEGSAPGTSTEPSEGSAPGTSESATPESGPGSEPATSGSETPGSEPATSGSETPGSPAGSPTSTEEGTSESATPESGPGTSTEPSEGSAPGTSTEPSEGSAPGSPAGSPTSTEEGTSTEPSEGSAPGTSTEPSEGSAPGTSESATPESGPGTSTEPSEGSAPGTSESATPESGPGSEPATSGSETPGTSTEPSEGSAPGTSTEPSEGSAPGTSESATPESGPGTSESATPESGPGSPAGSPTSTEEGTSESATPESGPGSEPATSGSETPGTSESATPESGPGTSTEPSEGSAPGTSTEPSEGSAPGTSTEPSEGSAPGTSTEPSEGSAPGTSTEPSEGSAPGTSTEPSEGSAPGSPAGSPTSTEEGTSTEPSEGSAPGTSESATPESGPGSEPATSGSETPGTSESATPESGPGSEPATSGSETPGTSESATPESGPGTSTEPSEGSAPGTSESATPESGPGSPAGSPTSTEEGSPAGSPTSTEEGSPAGSPTSTEEGTSESATPESGPGTSTEPSEGSAPGYAEGTFISDYSIAMDKIHQQDFVNWLLAQKGKKNDWKHNITQ

SEQ ID NO: 1907 - protein, 816 aa, Artificial Sequence
  Description of Artificial Sequence: Synthetic polypeptide
MDSDETGFEHSGLWVSVLAGLLLGACQAHPIPDSSPLLQFGGQVRQRYLYTDDAQQTEAHLEIREDGTVGGAADQSPESLLQLKALKPGVIQILGVKTSRFLCQRPDGALYGSLHFDPEACSFRELLLEDGYNVYQSEAHGLPLHLPGNKSPHRDPAPRGPARFLPLPGLPPALPEPPGILAPQPPDVGSSDPLSMVGPSQGRSPSYASGGSPAGSPTSTEEGTSESATPESGPGTSTEPSEGSAPGSPAGSPTSTEEGTSTEPSEGSAPGTSTEPSEGSAPGTSESATPESGPGSEPATSGSETPGSEPATSGSETPGSPAGSPTSTEEGTSESATPESGPGTSTEPSEGSAPGTSTEPSEGSAPGSPAGSPTSTEEGTSTEPSEGSAPGTSTEPSEGSAPGTSESATPESGPGTSTEPSEGSAPGTSESATPESGPGSEPATSGSETPGTSTEPSEGSAPGTSTEPSEGSAPGTSESATPESGPGTSESATPESGPGSPAGSPTSTEEGTSESATPESGPGSEPATSGSETPGTSESATPESGPGTSTEPSEGSAPGTSTEPSEGSAPGTSTEPSEGSAPGTSTEPSEGSAPGTSTEPSEGSAPGTSTEPSEGSAPGSPAGSPTSTEEGTSTEPSEGSAPGTSESATPESGPGSEPATSGSETPGTSESATPESGPGSEPATSGSETPGTSESATPESGPGTSTEPSEGSAPGTSESATPESGPGSPAGSPTSTEEGSPAGSPTSTEEGSPAGSPTSTEEGTSESATPESGPGTSTEPSEGSAPGHSQGTFTSDYSKYLDSRRAQDFVQWLMNT

SEQ ID NO: 1908 - protein, 824 aa, Artificial Sequence
  Description of Artificial Sequence: Synthetic polypeptide
MDSDETGFEHSGLWVSVLAGLLLGACQAHPIPDSSPLLQFGGQVRQRYLYTDDAQQTEAHLEIREDGTVGGAADQSPESLLQLKALKPGVIQILGVKTSRFLCQRPDGALYGSLHFDPEACSFRELLLEDGYNVYQSEAHGLPLHLPGNKSPHRDPAPRGPARFLPLPGLPPALPEPPGILAPQPPDVGSSDPLSMVGPSQGRSPSYASGGSPAGSPTSTEEGTSESATPESGPGTSTEPSEGSAPGSPAGSPTSTEEGTSTEPSEGSAPGTSTEPSEGSAPGTSESATPESGPGSEPATSGSETPGSEPATSGSETPGSPAGSPTSTEEGTSESATPESGPGTSTEPSEGSAPGTSTEPSEGSAPGSPAGSPTSTEEGTSTEPSEGSAPGTSTEPSEGSAPGTSESATPESGPGTSTEPSEGSAPGTSESATPESGPGSEPATSGSETPGTSTEPSEGSAPGTSTEPSEGSAPGTSESATPESGPGTSESATPESGPGSPAGSPTSTEEGTSESATPESGPGSEPATSGSETPGTSESATPESGPGTSTEPSEGSAPGTSTEPSEGSAPGTSTEPSEGSAPGTSTEPSEGSAPGTSTEPSEGSAPGTSTEPSEGSAPGSPAGSPTSTEEGTSTEPSEGSAPGTSESATPESGPGSEPATSGSETPGTSESATPESGPGSEPATSGSETPGTSESATPESGPGTSTEPSEGSAPGTSESATPESGPGSPAGSPTSTEEGSPAGSPTSTEEGSPAGSPTSTEEGTSESATPESGPGTSTEPSEGSAPGHDEFERHAEGTFTSDVSSTLEGQAALEFIAWLVKGRG

SEQ ID NO: 1909 - protein, 817 aa, Artificial Sequence
  Description of Artificial Sequence: Synthetic polypeptide
MDSDETGFEHSGLWVSVLAGLLLGACQAHPIPDSSPLLQFGGQVRQRYLYTDDAQQTEAHLEIREDGTVGGAADQSPESLLQLKALKPGVIQILGVKTSRFLCQRPDGALYGSLHFDPEACSFRELLLEDGYNVYQSEAHGLPLHLPGNKSPHRDPAPRGPARFLPLPGLPPALPEPPGILAPQPPDVGSSDPLSMVGPSQGRSPSYASGGSPAGSPTSTEEGTSESATPESGPGTSTEPSEGSAPGSPAGSPTSTEEGTSTEPSEGSAPGTSTEPSEGSAPGTSESATPESGPGSEPATSGSETPGSEPATSGSETPGSPAGSPTSTEEGTSESATPESGPGTSTEPSEGSAPGTSTEPSEGSAPGSPAGSPTSTEEGTSTEPSEGSAPGTSTEPSEGSAPGTSESATPESGPGTSTEPSEGSAPGTSESATPESGPGSEPATSGSETPGTSTEPSEGSAPGTSTEPSEGSAPGTSESATPESGPGTSESATPESGPGSPAGSPTSTEEGTSESATPESGPGSEPATSGSETPGTSESATPESGPGTSTEPSEGSAPGTSTEPSEGSAPGTSTEPSEGSAPGTSTEPSEGSAPGTSTEPSEGSAPGTSTEPSEGSAPGSPAGSPTSTEEGTSTEPSEGSAPGTSESATPESGPGSEPATSGSETPGTSESATPESGPGSEPATSGSETPGTSESATPESGPGTSTEPSEGSAPGTSESATPESGPGSPAGSPTSTEEGSPAGSPTSTEEGSPAGSPTSTEEGTSESATPESGPGTSTEPSEGSAPGHAEGTFTSDVSSYLEGQAALEFIAWLVKGR

SEQ ID NO: 1910 - protein, 820 aa, Artificial Sequence
  Description of Artificial Sequence: Synthetic polypeptide
MDSDETGFEHSGLWVSVLAGLLLGACQAHPIPDSSPLLQFGGQVRQRYLYTDDAQQTEAHLEIREDGTVGGAADQSPESLLQLKALKPGVIQILGVKTSRFLCQRPDGALYGSLHFDPEACSFRELLLEDGYNVYQSEAHGLPLHLPGNKSPHRDPAPRGPARFLPLPGLPPALPEPPGILAPQPPDVGSSDPLSMVGPSQGRSPSYASGGSPAGSPTSTEEGTSESATPESGPGTSTEPSEGSAPGSPAGSPTSTEEGTSTEPSEGSAPGTSTEPSEGSAPGTSESATPESGPGSEPATSGSETPGSEPATSGSETPGSPAGSPTSTEEGTSESATPESGPGTSTEPSEGSAPGTSTEPSEGSAPGSPAGSPTSTEEGTSTEPSEGSAPGTSTEPSEGSAPGTSESATPESGPGTSTEPSEGSAPGTSESATPESGPGSEPATSGSETPGTSTEPSEGSAPGTSTEPSEGSAPGTSESATPESGPGTSESATPESGPGSPAGSPTSTEEGTSESATPESGPGSEPATSGSETPGTSESATPESGPGTSTEPSEGSAPGTSTEPSEGSAPGTSTEPSEGSAPGTSTEPSEGSAPGTSTEPSEGSAPGTSTEPSEGSAPGSPAGSPTSTEEGTSTEPSEGSAPGTSESATPESGPGSEPATSGSETPGTSESATPESGPGSEPATSGSETPGTSESATPESGPGTSTEPSEGSAPGTSESATPESGPGSPAGSPTSTEEGSPAGSPTSTEEGSPAGSPTSTEEGTSESATPESGPGTSTEPSEGSAPGHADGSFSDEMNTILDNLAARDFINWLIETKITD

SEQ ID NO: 1911 - protein, 857 aa, Artificial Sequence
  Description of Artificial Sequence: Synthetic polypeptide
MDSDETGFEHSGLWVSVLAGLLLGACQAHPIPDSSPLLQFGGQVRQRYLYTDDAQQTEAHLEIREDGTVGGAADQSPESLLQLKALKPGVIQILGVKTSRFLCQRPDGALYGSLHFDPEACSFRELLLEDGYNVYQSEAHGLPLHLPGNKSPHRDPAPRGPARFLPLPGLPPALPEPPGILAPQPPDVGSSDPLSMVGPSQGRSPSYASGGSPAGSPTSTEEGTSESATPESGPGTSTEPSEGSAPGSPAGSPTSTEEGTSTEPSEGSAPGTSTEPSEGSAPGTSESATPESGPGSEPATSGSETPGSEPATSGSETPGSPAGSPTSTEEGTSESATPESGPGTSTEPSEGSAPGTSTEPSEGSAPGSPAGSPTSTEEGTSTEPSEGSAPGTSTEPSEGSAPGTSESATPESGPGTSTEPSEGSAPGTSESATPESGPGSEPATSGSETPGTSTEPSEGSAPGTSTEPSEGSAPGTSESATPESGPGTSESATPESGPGSPAGSPTSTEEGTSESATPESGPGSEPATSGSETPGTSESATPESGPGTSTEPSEGSAPGTSTEPSEGSAPGTSTEPSEGSAPGTSTEPSEGSAPGTSTEPSEGSAPGTSTEPSEGSAPGSPAGSPTSTEEGTSTEPSEGSAPGTSESATPESGPGSEPATSGSETPGTSESATPESGPGSEPATSGSETPGTSESATPESGPGTSTEPSEGSAPGTSESATPESGPGSPAGSPTSTEEGSPAGSPTSTEEGSPAGSPTSTEEGTSESATPESGPGTSTEPSEGSAPGGPETLCGAELVDALQFVCGDRGFYFNKPTGYGSSSRRAPQTGIVDECCFRSCDLRRLEMYCAPLKPAKSA

SEQ ID NO: 1912 - protein, 854 aa, Artificial Sequence
  Description of Artificial Sequence: Synthetic polypeptide
MDSDETGFEHSGLWVSVLAGLLLGACQAHPIPDSSPLLQFGGQVRQRYLYTDDAQQTEAHLEIREDGTVGGAADQSPESLLQLKALKPGVIQILGVKTSRFLCQRPDGALYGSLHFDPEACSFRELLLEDGYNVYQSEAHGLPLHLPGNKSPHRDPAPRGPARFLPLPGLPPALPEPPGILAPQPPDVGSSDPLSMVGPSQGRSPSYASGGSPAGSPTSTEEGTSESATPESGPGTSTEPSEGSAPGSPAGSPTSTEEGTSTEPSEGSAPGTSTEPSEGSAPGTSESATPESGPGSEPATSGSETPGSEPATSGSETPGSPAGSPTSTEEGTSESATPESGPGTSTEPSEGSAPGTSTEPSEGSAPGSPAGSPTSTEEGTSTEPSEGSAPGTSTEPSEGSAPGTSESATPESGPGTSTEPSEGSAPGTSESATPESGPGSEPATSGSETPGTSTEPSEGSAPGTSTEPSEGSAPGTSESATPESGPGTSESATPESGPGSPAGSPTSTEEGTSESATPESGPGSEPATSGSETPGTSESATPESGPGTSTEPSEGSAPGTSTEPSEGSAPGTSTEPSEGSAPGTSTEPSEGSAPGTSTEPSEGSAPGTSTEPSEGSAPGSPAGSPTSTEEGTSTEPSEGSAPGTSESATPESGPGSEPATSGSETPGTSESATPESGPGSEPATSGSETPGTSESATPESGPGTSTEPSEGSAPGTSESATPESGPGSPAGSPTSTEEGSPAGSPTSTEEGSPAGSPTSTEEGTSESATPESGPGTSTEPSEGSAPGAYRPSETLCGGELVDTLQFVCGDRGFYFSRPASRVSRRSRGIVEECCFRSCDLALLETYCATPAKSE

SEQ ID NO: 1913 - protein, 936 aa, Artificial Sequence
  Description of Artificial Sequence: Synthetic polypeptide
MDSDETGFEHSGLWVSVLAGLLLGACQAHPIPDSSPLLQFGGQVRQRYLYTDDAQQTEAHLEIREDGTVGGAADQSPESLLQLKALKPGVIQILGVKTSRFLCQRPDGALYGSLHFDPEACSFRELLLEDGYNVYQSEAHGLPLHLPGNKSPHRDPAPRGPARFLPLPGLPPALPEPPGILAPQPPDVGSSDPLSMVGPSQGRSPSYASGGSPAGSPTSTEEGTSESATPESGPGTSTEPSEGSAPGSPAGSPTSTEEGTSTEPSEGSAPGTSTEPSEGSAPGTSESATPESGPGSEPATSGSETPGSEPATSGSETPGSPAGSPTSTEEGTSESATPESGPGTSTEPSEGSAPGTSTEPSEGSAPGSPAGSPTSTEEGTSTEPSEGSAPGTSTEPSEGSAPGTSESATPESGPGTSTEPSEGSAPGTSESATPESGPGSEPATSGSETPGTSTEPSEGSAPGTSTEPSEGSAPGTSESATPESGPGTSESATPESGPGSPAGSPTSTEEGTSESATPESGPGSEPATSGSETPGTSESATPESGPGTSTEPSEGSAPGTSTEPSEGSAPGTSTEPSEGSAPGTSTEPSEGSAPGTSTEPSEGSAPGTSTEPSEGSAPGSPAGSPTSTEEGTSTEPSEGSAPGTSESATPESGPGSEPATSGSETPGTSESATPESGPGSEPATSGSETPGTSESATPESGPGTSTEPSEGSAPGTSESATPESGPGSPAGSPTSTEEGSPAGSPTSTEEGSPAGSPTSTEEGTSESATPESGPGTSTEPSEGSAPGEESQKKLPSSRITCPQGSVAYGSYCYSLILIPQTWSNAELSCQMHFSGHLAFLLSTGEITFVSSLVKNSLTAYQYIWIGLHDPSHGTLPNGSGWKWSSSNVLTFYNWERNPSIAADRGYCAVLSQKSGFQKWRDFNCENELPYICKFKV

SEQ ID NO: 1914 - protein, 834 aa, Artificial Sequence
  Description of Artificial Sequence: Synthetic polypeptide
MDSDETGFEHSGLWVSVLAGLLLGACQAHPIPDSSPLLQFGGQVRQRYLYTDDAQQTEAHLEIREDGTVGGAADQSPESLLQLKALKPGVIQILGVKTSRFLCQRPDGALYGSLHFDPEACSFRELLLEDGYNVYQSEAHGLPLHLPGNKSPHRDPAPRGPARFLPLPGLPPALPEPPGILAPQPPDVGSSDPLSMVGPSQGRSPSYASGGSPAGSPTSTEEGTSESATPESGPGTSTEPSEGSAPGSPAGSPTSTEEGTSTEPSEGSAPGTSTEPSEGSAPGTSESATPESGPGSEPATSGSETPGSEPATSGSETPGSPAGSPTSTEEGTSESATPESGPGTSTEPSEGSAPGTSTEPSEGSAPGSPAGSPTSTEEGTSTEPSEGSAPGTSTEPSEGSAPGTSESATPESGPGTSTEPSEGSAPGTSESATPESGPGSEPATSGSETPGTSTEPSEGSAPGTSTEPSEGSAPGTSESATPESGPGTSESATPESGPGSPAGSPTSTEEGTSESATPESGPGSEPATSGSETPGTSESATPESGPGTSTEPSEGSAPGTSTEPSEGSAPGTSTEPSEGSAPGTSTEPSEGSAPGTSTEPSEGSAPGTSTEPSEGSAPGSPAGSPTSTEEGTSTEPSEGSAPGTSESATPESGPGSEPATSGSETPGTSESATPESGPGSEPATSGSETPGTSESATPESGPGTSTEPSEGSAPGTSESATPESGPGSPAGSPTSTEEGSPAGSPTSTEEGSPAGSPTSTEEGTSESATPESGPGTSTEPSEGSAPGTQAQLLRVGCVLGTCQVQNLSHRLWQLMGPAGRQDSAPVDPSSPHSY

SEQ ID NO: 1915 - protein, 933 aa, Artificial Sequence
  Description of Artificial Sequence: Synthetic polypeptide
MDSDETGFEHSGLWVSVLAGLLLGACQAHPIPDSSPLLQFGGQVRQRYLYTDDAQQTEAHLEIREDGTVGGAADQSPESLLQLKALKPGVIQILGVKTSRFLCQRPDGALYGSLHFDPEACSFRELLLEDGYNVYQSEAHGLPLHLPGNKSPHRDPAPRGPARFLPLPGLPPALPEPPGILAPQPPDVGSSDPLSMVGPSQGRSPSYASGGSPAGSPTSTEEGTSESATPESGPGTSTEPSEGSAPGSPAGSPTSTEEGTSTEPSEGSAPGTSTEPSEGSAPGTSESATPESGPGSEPATSGSETPGSEPATSGSETPGSPAGSPTSTEEGTSESATPESGPGTSTEPSEGSAPGTSTEPSEGSAPGSPAGSPTSTEEGTSTEPSEGSAPGTSTEPSEGSAPGTSESATPESGPGTSTEPSEGSAPGTSESATPESGPGSEPATSGSETPGTSTEPSEGSAPGTSTEPSEGSAPGTSESATPESGPGTSESATPESGPGSPAGSPTSTEEGTSESATPESGPGSEPATSGSETPGTSESATPESGPGTSTEPSEGSAPGTSTEPSEGSAPGTSTEPSEGSAPGTSTEPSEGSAPGTSTEPSEGSAPGTSTEPSEGSAPGSPAGSPTSTEEGTSTEPSEGSAPGTSESATPESGPGSEPATSGSETPGTSESATPESGPGSEPATSGSETPGTSESATPESGPGTSTEPSEGSAPGTSESATPESGPGSPAGSPTSTEEGSPAGSPTSTEEGSPAGSPTSTEEGTSESATPESGPGTSTEPSEGSAPGVPIQKVQDDTKTLIKTIVTRINDISHTQSVSSKQKVTGLDFIPGLHPILTLSKMDQTLAVYQQILTSMPSRNVIQISNDLENLRDLLHVLAFSKSCHLPWASGLETLDSLGGVLEASGYSTEVVALSRLQGSLQDMLWQLDLSPGC

SEQ ID NO: 1916 - protein, 812 aa, Artificial Sequence
  Description of Artificial Sequence: Synthetic polypeptide
MDSDETGFEHSGLWVSVLAGLLLGACQAHPIPDSSPLLQFGGQVRQRYLYTDDAQQTEAHLEIREDGTVGGAADQSPESLLQLKALKPGVIQILGVKTSRFLCQRPDGALYGSLHFDPEACSFRELLLEDGYNVYQSEAHGLPLHLPGNKSPHRDPAPRGPARFLPLPGLPPALPEPPGILAPQPPDVGSSDPLSMVGPSQGRSPSYASGGSPAGSPTSTEEGTSESATPESGPGTSTEPSEGSAPGSPAGSPTSTEEGTSTEPSEGSAPGTSTEPSEGSAPGTSESATPESGPGSEPATSGSETPGSEPATSGSETPGSPAGSPTSTEEGTSESATPESGPGTSTEPSEGSAPGTSTEPSEGSAPGSPAGSPTSTEEGTSTEPSEGSAPGTSTEPSEGSAPGTSESATPESGPGTSTEPSEGSAPGTSESATPESGPGSEPATSGSETPGTSTEPSEGSAPGTSTEPSEGSAPGTSESATPESGPGTSESATPESGPGSPAGSPTSTEEGTSESATPESGPGSEPATSGSETPGTSESATPESGPGTSTEPSEGSAPGTSTEPSEGSAPGTSTEPSEGSAPGTSTEPSEGSAPGTSTEPSEGSAPGTSTEPSEGSAPGSPAGSPTSTEEGTSTEPSEGSAPGTSESATPESGPGSEPATSGSETPGTSESATPESGPGSEPATSGSETPGTSESATPESGPGTSTEPSEGSAPGTSESATPESGPGSPAGSPTSTEEGSPAGSPTSTEEGSPAGSPTSTEEGTSESATPESGPGTSTEPSEGSAPGFRVDEEFQSPFASQSRGYFLFRPRN

SEQ ID NO: 1917 - protein, 824 aa, Artificial Sequence
  Description of Artificial Sequence: Synthetic polypeptide
MDSDETGFEHSGLWVSVLAGLLLGACQAHPIPDSSPLLQFGGQVRQRYLYTDDAQQTEAHLEIREDGTVGGAADQSPESLLQLKALKPGVIQILGVKTSRFLCQRPDGALYGSLHFDPEACSFRELLLEDGYNVYQSEAHGLPLHLPGNKSPHRDPAPRGPARFLPLPGLPPALPEPPGILAPQPPDVGSSDPLSMVGPSQGRSPSYASGGSPAGSPTSTEEGTSESATPESGPGTSTEPSEGSAPGSPAGSPTSTEEGTSTEPSEGSAPGTSTEPSEGSAPGTSESATPESGPGSEPATSGSETPGSEPATSGSETPGSPAGSPTSTEEGTSESATPESGPGTSTEPSEGSAPGTSTEPSEGSAPGSPAGSPTSTEEGTSTEPSEGSAPGTSTEPSEGSAPGTSESATPESGPGTSTEPSEGSAPGTSESATPESGPGSEPATSGSETPGTSTEPSEGSAPGTSTEPSEGSAPGTSESATPESGPGTSESATPESGPGSPAGSPTSTEEGTSESATPESGPGSEPATSGSETPGTSESATPESGPGTSTEPSEGSAPGTSTEPSEGSAPGTSTEPSEGSAPGTSTEPSEGSAPGTSTEPSEGSAPGTSTEPSEGSAPGSPAGSPTSTEEGTSTEPSEGSAPGTSESATPESGPGSEPATSGSETPGTSESATPESGPGSEPATSGSETPGTSESATPESGPGTSTEPSEGSAPGTSESATPESGPGSPAGSPTSTEEGSPAGSPTSTEEGSPAGSPTSTEEGTSESATPESGPGTSTEPSEGSAPGHSQGTFTSDYSKYLDSRRAQDFVQWLMNTKRNRNNIA

SEQ ID NO: 1918 - protein, 824 aa, Artificial Sequence; identical to SEQ ID NO: 1764
  Description of Artificial Sequence: Synthetic polypeptide

SEQ ID NO: 1919 - protein, 823 aa, Artificial Sequence
  Description of Artificial Sequence: Synthetic polypeptide
MDSDETGFEHSGLWVSVLAGLLLGACQAHPIPDSSPLLQFGGQVRQRYLYTDDAQQTEAHLEIREDGTVGGAADQSPESLLQLKALKPGVIQILGVKTSRFLCQRPDGALYGSLHFDPEACSFRELLLEDGYNVYQSEAHGLPLHLPGNKSPHRDPAPRGPARFLPLPGLPPALPEPPGILAPQPPDVGSSDPLSMVGPSQGRSPSYASGGSPAGSPTSTEEGTSESATPESGPGTSTEPSEGSAPGSPAGSPTSTEEGTSTEPSEGSAPGTSTEPSEGSAPGTSESATPESGPGSEPATSGSETPGSEPATSGSETPGSPAGSPTSTEEGTSESATPESGPGTSTEPSEGSAPGTSTEPSEGSAPGSPAGSPTSTEEGTSTEPSEGSAPGTSTEPSEGSAPGTSESATPESGPGTSTEPSEGSAPGTSESATPESGPGSEPATSGSETPGTSTEPSEGSAPGTSTEPSEGSAPGTSESATPESGPGTSESATPESGPGSPAGSPTSTEEGTSESATPESGPGSEPATSGSETPGTSESATPESGPGTSTEPSEGSAPGTSTEPSEGSAPGTSTEPSEGSAPGTSTEPSEGSAPGTSTEPSEGSAPGTSTEPSEGSAPGSPAGSPTSTEEGTSTEPSEGSAPGTSESATPESGPGSEPATSGSETPGTSESATPESGPGSEPATSGSETPGTSESATPESGPGTSTEPSEGSAPGTSESATPESGPGSPAGSPTSTEEGSPAGSPTSTEEGSPAGSPTSTEEGTSESATPESGPGTSTEPSEGSAPGYPIKPEAPGEDASPEELNRYYASLRHYLNLVTRQRY

SEQ ID NO: 1920 - protein, 828 aa, Artificial Sequence
  Description of Artificial Sequence: Synthetic polypeptide
MDSDETGFEHSGLWVSVLAGLLLGACQAHPIPDSSPLLQFGGQVRQRYLYTDDAQQTEAHLEIREDGTVGGAADQSPESLLQLKALKPGVIQILGVKTSRFLCQRPDGALYGSLHFDPEACSFRELLLEDGYNVYQSEAHGLPLHLPGNKSPHRDPAPRGPARFLPLPGLPPALPEPPGILAPQPPDVGSSDPLSMVGPSQGRSPSYASGGSPAGSPTSTEEGTSESATPESGPGTSTEPSEGSAPGSPAGSPTSTEEGTSTEPSEGSAPGTSTEPSEGSAPGTSESATPESGPGSEPATSGSETPGSEPATSGSETPGSPAGSPTSTEEGTSESATPESGPGTSTEPSEGSAPGTSTEPSEGSAPGSPAGSPTSTEEGTSTEPSEGSAPGTSTEPSEGSAPGTSESATPESGPGTSTEPSEGSAPGTSESATPESGPGSEPATSGSETPGTSTEPSEGSAPGTSTEPSEGSAPGTSESATPESGPGTSESATPESGPGSPAGSPTSTEEGTSESATPESGPGSEPATSGSETPGTSESATPESGPGTSTEPSEGSAPGTSTEPSEGSAPGTSTEPSEGSAPGTSTEPSEGSAPGTSTEPSEGSAPGTSTEPSEGSAPGSPAGSPTSTEEGTSTEPSEGSAPGTSESATPESGPGSEPATSGSETPGTSESATPESGPGSEPATSGSETPGTSESATPESGPGTSTEPSEGSAPGTSESATPESGPGSPAGSPTSTEEGSPAGSPTSTEEGSPAGSPTSTEEGTSESATPESGPGTSTEPSEGSAPGIVLSLDVPIGLLQILLEQARARAAREQATTNARILARVGHC

SEQ ID NO: 1921 - protein, 825 aa, Artificial Sequence
  Description of Artificial Sequence: Synthetic polypeptide
MDSDETGFEHSGLWVSVLAGLLLGACQAHPIPDSSPLLQFGGQVRQRYLYTDDAQQTEAHLEIREDGTVGGAADQSPESLLQLKALKPGVIQILGVKTSRFLCQRPDGALYGSLHFDPEACSFRELLLEDGYNVYQSEAHGLPLHLPGNKSPHRDPAPRGPARFLPLPGLPPALPEPPGILAPQPPDVGSSDPLSMVGPSQGRSPSYASGGSPAGSPTSTEEGTSESATPESGPGTSTEPSEGSAPGSPAGSPTSTEEGTSTEPSEGSAPGTSTEPSEGSAPGTSESATPESGPGSEPATSGSETPGSEPATSGSETPGSPAGSPTSTEEGTSESATPESGPGTSTEPSEGSAPGTSTEPSEGSAPGSPAGSPTSTEEGTSTEPSEGSAPGTSTEPSEGSAPGTSESATPESGPGTSTEPSEGSAPGTSESATPESGPGSEPATSGSETPGTSTEPSEGSAPGTSTEPSEGSAPGTSESATPESGPGTSESATPESGPGSPAGSPTSTEEGTSESATPESGPGSEPATSGSETPGTSESATPESGPGTSTEPSEGSAPGTSTEPSEGSAPGTSTEPSEGSAPGTSTEPSEGSAPGTSTEPSEGSAPGTSTEPSEGSAPGSPAGSPTSTEEGTSTEPSEGSAPGTSESATPESGPGSEPATSGSETPGTSESATPESGPGSEPATSGSETPGTSESATPESGPGTSTEPSEGSAPGTSESATPESGPGSPAGSPTSTEEGSPAGSPTSTEEGSPAGSPTSTEEGTSESATPESGPGTSTEPSEGSAPGFTLSLDVPTNIMNLLFNIAKAKNLRAQAAANAHLMAQI

SEQ ID NO: 1922 - protein, 821 aa, Artificial Sequence
  Description of Artificial Sequence: Synthetic polypeptide
QLGPQGPPHLVADPSKKQGPWLEEEEEAYGWMDFGGSPAGSPTSTEEGTSESATPESGPGTSTEPSEGSAPGSPAGSPTSTEEGTSTEPSEGSAPGTSTEPSEGSAPGTSESATPESGPGSEPATSGSETPGSEPATSGSETPGSPAGSPTSTEEGTSESATPESGPGTSTEPSEGSAPGTSTEPSEGSAPGSPAGSPTSTEEGTSTEPSEGSAPGTSTEPSEGSAPGTSESATPESGPGTSTEPSEGSAPGTSESATPESGPGSEPATSGSETPGTSTEPSEGSAPGTSTEPSEGSAPGTSESATPESGPGTSESATPESGPGSPAGSPTSTEEGTSESATPESGPGSEPATSGSETPGTSESATPESGPGTSTEPSEGSAPGTSTEPSEGSAPGTSTEPSEGSAPGTSTEPSEGSAPGTSTEPSEGSAPGTSTEPSEGSAPGSPAGSPTSTEEGTSTEPSEGSAPGTSESATPESGPGSEPATSGSETPGTSESATPESGPGSEPATSGSETPGTSESATPESGPGTSTEPSEGSAPGTSESATPESGPGSPAGSPTSTEEGSPAGSPTSTEEGSPAGSPTSTEEGTSESATPESGPGTSTEPSEGSAPGMDSDETGFEHSGLWVSVLAGLLLGACQAHPIPDSSPLLQFGGQVRQRYLYTDDAQQTEAHLEIREDGTVGGAADQSPESLLQLKALKPGVIQILGVKTSRFLCQRPDGALYGSLHFDPEACSFRELLLEDGYNVYQSEAHGLPLHLPGNKSPHRDPAPRGPARFLPLPGLPPALPEPPGILAPQPPDVGSSDPLSMVGPSQGRSPSYAS

SEQ ID NO: 1923 - protein, 809 aa, Artificial Sequence
  Description of Artificial Sequence: Synthetic polypeptide
DPSKKQGPWLEEEEEAYGWMDFGGSPAGSPTSTEEGTSESATPESGPGTSTEPSEGSAPGSPAGSPTSTEEGTSTEPSEGSAPGTSTEPSEGSAPGTSESATPESGPGSEPATSGSETPGSEPATSGSETPGSPAGSPTSTEEGTSESATPESGPGTSTEPSEGSAPGTSTEPSEGSAPGSPAGSPTSTEEGTSTEPSEGSAPGTSTEPSEGSAPGTSESATPESGPGTSTEPSEGSAPGTSESATPESGPGSEPATSGSETPGTSTEPSEGSAPGTSTEPSEGSAPGTSESATPESGPGTSESATPESGPGSPAGSPTSTEEGTSESATPESGPGSEPATSGSETPGTSESATPESGPGTSTEPSEGSAPGTSTEPSEGSAPGTSTEPSEGSAPGTSTEPSEGSAPGTSTEPSEGSAPGTSTEPSEGSAPGSPAGSPTSTEEGTSTEPSEGSAPGTSESATPESGPGSEPATSGSETPGTSESATPESGPGSEPATSGSETPGTSESATPESGPGTSTEPSEGSAPGTSESATPESGPGSPAGSPTSTEEGSPAGSPTSTEEGSPAGSPTSTEEGTSESATPESGPGTSTEPSEGSAPGMDSDETGFEHSGLWVSVLAGLLLGACQAHPIPDSSPLLQFGGQVRQRYLYTDDAQQTEAHLEIREDGTVGGAADQSPESLLQLKALKPGVIQILGVKTSRFLCQRPDGALYGSLHFDPEACSFRELLLEDGYNVYQSEAHGLPLHLPGNKSPHRDPAPRGPARFLPLPGLPPALPEPPGILAPQPPDVGSSDPLSMVGPSQGRSPSYAS

SEQ ID NO: 1924 - protein, 829 aa, Artificial Sequence
  Description of Artificial Sequence: Synthetic polypeptide
YAEGTFISDYSIAMDKIHQQDFVNWLLAQKGKKNDWKHNITQGGSPAGSPTSTEEGTSESATPESGPGTSTEPSEGSAPGSPAGSPTSTEEGTSTEPSEGSAPGTSTEPSEGSAPGTSESATPESGPGSEPATSGSETPGSEPATSGSETPGSPAGSPTSTEEGTSESATPESGPGTSTEPSEGSAPGTSTEPSEGSAPGSPAGSPTSTEEGTSTEPSEGSAPGTSTEPSEGSAPGTSESATPESGPGTSTEPSEGSAPGTSESATPESGPGSEPATSGSETPGTSTEPSEGSAPGTSTEPSEGSAPGTSESATPESGPGTSESATPESGPGSPAGSPTSTEEGTSESATPESGPGSEPATSGSETPGTSESATPESGPGTSTEPSEGSAPGTSTEPSEGSAPGTSTEPSEGSAPGTSTEPSEGSAPGTSTEPSEGSAPGTSTEPSEGSAPGSPAGSPTSTEEGTSTEPSEGSAPGTSESATPESGPGSEPATSGSETPGTSESATPESGPGSEPATSGSETPGTSESATPESGPGTSTEPSEGSAPGTSESATPESGPGSPAGSPTSTEEGSPAGSPTSTEEGSPAGSPTSTEEGTSESATPESGPGTSTEPSEGSAPGMDSDETGFEHSGLWVSVLAGLLLGACQAHPIPDSSPLLQFGGQVRQRYLYTDDAQQTEAHLEIREDGTVGGAADQSPESLLQLKALKPGVIQILGVKTSRFLCQRPDGALYGSLHFDPEACSFRELLLEDGYNVYQSEAHGLPLHLPGNKSPHRDPAPRGPARFLPLPGLPPALPEPPGILAPQPPDVGSSDPLSMVGPSQGRSPSYAS

SEQ ID NO: 1925 - protein, 816 aa, Artificial Sequence
  Description of Artificial Sequence: Synthetic polypeptide
HSQGTFTSDYSKYLDSRRAQDFVQWLMNTGGSPAGSPTSTEEGTSESATPESGPGTSTEPSEGSAPGSPAGSPTSTEEGTSTEPSEGSAPGTSTEPSEGSAPGTSESATPESGPGSEPATSGSETPGSEPATSGSETPGSPAGSPTSTEEGTSESATPESGPGTSTEPSEGSAPGTSTEPSEGSAPGSPAGSPTSTEEGTSTEPSEGSAPGTSTEPSEGSAPGTSESATPESGPGTSTEPSEGSAPGTSESATPESGPGSEPATSGSETPGTSTEPSEGSAPGTSTEPSEGSAPGTSESATPESGPGTSESATPESGPGSPAGSPTSTEEGTSESATPESGPGSEPATSGSETPGTSESATPESGPGTSTEPSEGSAPGTSTEPSEGSAPGTSTEPSEGSAPGTSTEPSEGSAPGTSTEPSEGSAPGTSTEPSEGSAPGSPAGSPTSTEEGTSTEPSEGSAPGTSESATPESGPGSEPATSGSETPGTSESATPESGPGSEPATSGSETPGTSESATPESGPGTSTEPSEGSAPGTSESATPESGPGSPAGSPTSTEEGSPAGSPTSTEEGSPAGSPTSTEEGTSESATPESGPGTSTEPSEGSAPGMDSDETGFEHSGLWVSVLAGLLLGACQAHPIPDSSPLLQFGGQVRQRYLYTDDAQQTEAHLEIREDGTVGGAADQSPESLLQLKALKPGVIQILGVKTSRFLCQRPDGALYGSLHFDPEACSFRELLLEDGYNVYQSEAHGLPLHLPGNKSPHRDPAPRGPARFLPLPGLPPALPEPPGILAPQPPDVGSSDPLSMVGPSQGRSPSYAS

SEQ ID NO: 1926 - protein, 824 aa, Artificial Sequence
  Description of Artificial Sequence: Synthetic polypeptide
HDEFERHAEGTFTSDVSSTLEGQAALEFIAWLVKGRGGGSPAGSPTSTEEGTSESATPESGPGTSTEPSEGSAPGSPAGSPTSTEEGTSTEPSEGSAPGTSTEPSEGSAPGTSESATPESGPGSEPATSGSETPGSEPATSGSETPGSPAGSPTSTEEGTSESATPESGPGTSTEPSEGSAPGTSTEPSEGSAPGSPAGSPTSTEEGTSTEPSEGSAPGTSTEPSEGSAPGTSESATPESGPGTSTEPSEGSAPGTSESATPESGPGSEPATSGSETPGTSTEPSEGSAPGTSTEPSEGSAPGTSESATPESGPGTSESATPESGPGSPAGSPTSTEEGTSESATPESGPGSEPATSGSETPGTSESATPESGPGTSTEPSEGSAPGTSTEPSEGSAPGTSTEPSEGSAPGTSTEPSEGSAPGTSTEPSEGSAPGTSTEPSEGSAPGSPAGSPTSTEEGTSTEPSEGSAPGTSESATPESGPGSEPATSGSETPGTSESATPESGPGSEPATSGSETPGTSESATPESGPGTSTEPSEGSAPGTSESATPESGPGSPAGSPTSTEEGSPAGSPTSTEEGSPAGSPTSTEEGTSESATPESGPGTSTEPSEGSAPGMDSDETGFEHSGLWVSVLAGLLLGACQAHPIPDSSPLLQFGGQVRQRYLYTDDAQQTEAHLEIREDGTVGGAADQSPESLLQLKALKPGVIQILGVKTSRFLCQRPDGALYGSLHFDPEACSFRELLLEDGYNVYQSEAHGLPLHLPGNKSPHRDPAPRGPARFLPLPGLPPALPEPPGILAPQPPDVGSSDPLSMVGPSQGRSPSYAS

SEQ ID NO: 1927 - protein, 817 aa, Artificial Sequence
  Description of Artificial Sequence: Synthetic polypeptide
HAEGTFTSDVSSYLEGQAALEFIAWLVKGRGGSPAGSPTSTEEGTSESATPESGPGTSTEPSEGSAPGSPAGSPTSTEEGTSTEPSEGSAPGTSTEPSEGSAPGTSESATPESGPGSEPATSGSETPGSEPATSGSETPGSPAGSPTSTEEGTSESATPESGPGTSTEPSEGSAPGTSTEPSEGSAPGSPAGSPTSTEEGTSTEPSEGSAPGTSTEPSEGSAPGTSESATPESGPGTSTEPSEGSAPGTSESATPESGPGSEPATSGSETPGTSTEPSEGSAPGTSTEPSEGSAPGTSESATPESGPGTSESATPESGPGSPAGSPTSTEEGTSESATPESGPGSEPATSGSETPGTSESATPESGPGTSTEPSEGSAPGTSTEPSEGSAPGTSTEPSEGSAPGTSTEPSEGSAPGTSTEPSEGSAPGTSTEPSEGSAPGSPAGSPTSTEEGTSTEPSEGSAPGTSESATPESGPGSEPATSGSETPGTSESATPESGPGSEPATSGSETPGTSESATPESGPGTSTEPSEGSAPGTSESATPESGPGSPAGSPTSTEEGSPAGSPTSTEEGSPAGSPTSTEEGTSESATPESGPGTSTEPSEGSAPGMDSDETGFEHSGLWVSVLAGLLLGACQAHPIPDSSPLLQFGGQVRQRYLYTDDAQQTEAHLEIREDGTVGGAADQSPESLLQLKALKPGVIQILGVKTSRFLCQRPDGALYGSLHFDPEACSFRELLLEDGYNVYQSEAHGLPLHLPGNKSPHRDPAPRGPARFLPLPGLPPALPEPPGILAPQPPDVGSSDPLSMVGPSQGRSPSYAS

SEQ ID NO: 1928 - protein, 820 aa, Artificial Sequence
  Description of Artificial Sequence: Synthetic polypeptide
HADGSFSDEMNTILDNLAARDFINWLIETKITDGGSPAGSPTSTEEGTSESATPESGPGTSTEPSEGSAPGSPAGSPTSTEEGTSTEPSEGSAPGTSTEPSEGSAPGTSESATPESGPGSEPATSGSETPGSEPATSGSETPGSPAGSPTSTEEGTSESATPESGPGTSTEPSEGSAPGTSTEPSEGSAPGSPAGSPTSTEEGTSTEPSEGSAPGTSTEPSEGSAPGTSESATPESGPGTSTEPSEGSAPGTSESATPESGPGSEPATSGSETPGTSTEPSEGSAPGTSTEPSEGSAPGTSESATPESGPGTSESATPESGPGSPAGSPTSTEEGTSESATPESGPGSEPATSGSETPGTSESATPESGPGTSTEPSEGSAPGTSTEPSEGSAPGTSTEPSEGSAPGTSTEPSEGSAPGTSTEPSEGSAPGTSTEPSEGSAPGSPAGSPTSTEEGTSTEPSEGSAPGTSESATPESGPGSEPATSGSETPGTSESATPESGPGSEPATSGSETPGTSESATPESGPGTSTEPSEGSAPGTSESATPESGPGSPAGSPTSTEEGSPAGSPTSTEEGSPAGSPTSTEEGTSESATPESGPGTSTEPSEGSAPGMDSDETGFEHSGLWVSVLAGLLLGACQAHPIPDSSPLLQFGGQVRQRYLYTDDAQQTEAHLEIREDGTVGGAADQSPESLLQLKALKPGVIQILGVKTSRFLCQRPDGALYGSLHFDPEACSFRELLLEDGYNVYQSEAHGLPLHLPGNKSPHRDPAPRGPARFLPLPGLPPALPEPPGILAPQPPDVGSSDPLSMVGPSQGRSPSYAS

SEQ ID NO: 1929 - protein, 857 aa, Artificial Sequence
  Description of Artificial Sequence: Synthetic polypeptide
GPETLCGAELVDALQFVCGDRGFYFNKPTGYGSSSRRAPQTGIVDECCFRSCDLRRLEMYCAPLKPAKSAGGSPAGSPTSTEEGTSESATPESGPGTSTEPSEGSAPGSPAGSPTSTEEGTSTEPSEGSAPGTSTEPSEGSAPGTSESATPESGPGSEPATSGSETPGSEPATSGSETPGSPAGSPTSTEEGTSESATPESGPGTSTEPSEGSAPGTSTEPSEGSAPGSPAGSPTSTEEGTSTEPSEGSAPGTSTEPSEGSAPGTSESATPESGPGTSTEPSEGSAPGTSESATPESGPGSEPATSGSETPGTSTEPSEGSAPGTSTEPSEGSAPGTSESATPESGPGTSESATPESGPGSPAGSPTSTEEGTSESATPESGPGSEPATSGSETPGTSESATPESGPGTSTEPSEGSAPGTSTEPSEGSAPGTSTEPSEGSAPGTSTEPSEGSAPGTSTEPSEGSAPGTSTEPSEGSAPGSPAGSPTSTEEGTSTEPSEGSAPGTSESATPESGPGSEPATSGSETPGTSESATPESGPGSEPATSGSETPGTSESATPESGPGTSTEPSEGSAPGTSESATPESGPGSPAGSPTSTEEGSPAGSPTSTEEGSPAGSPTSTEEGTSESATPESGPGTSTEPSEGSAPGMDSDETGFEHSGLWVSVLAGLLLGACQAHPIPDSSPLLQFGGQVRQRYLYTDDAQQTEAHLEIREDGTVGGAADQSPESLLQLKALKPGVIQILGVKTSRFLCQRPDGALYGSLHFDPEACSFRELLLEDGYNVYQSEAHGLPLHLPGNKSPHRDPAPRGPARFLPLPGLPPALPEPPGILAPQPPDVGSSDPLSMVGPSQGRSPSYAS

SEQ ID NO: 1930 - protein, 854 aa, Artificial Sequence
  Description of Artificial Sequence: Synthetic polypeptide
AYRPSETLCGGELVDTLQFVCGDRGFYFSRPASRVSRRSRGIVEECCFRSCDLALLETYCATPAKSEGGSPAGSPTSTEEGTSESATPESGPGTSTEPSEGSAPGSPAGSPTSTEEGTSTEPSEGSAPGTSTEPSEGSAPGTSESATPESGPGSEPATSGSETPGSEPATSGSETPGSPAGSPTSTEEGTSESATPESGPGTSTEPSEGSAPGTSTEPSEGSAPGSPAGSPTSTEEGTSTEPSEGSAPGTSTEPSEGSAPGTSESATPESGPGTSTEPSEGSAPGTSESATPESGPGSEPATSGSETPGTSTEPSEGSAPGTSTEPSEGSAPGTSESATPESGPGTSESATPESGPGSPAGSPTSTEEGTSESATPESGPGSEPATSGSETPGTSESATPESGPGTSTEPSEGSAPGTSTEPSEGSAPGTSTEPSEGSAPGTSTEPSEGSAPGTSTEPSEGSAPGTSTEPSEGSAPGSPAGSPTSTEEGTSTEPSEGSAPGTSESATPESGPGSEPATSGSETPGTSESATPESGPGSEPATSGSETPGTSESATPESGPGTSTEPSEGSAPGTSESATPESGPGSPAGSPTSTEEGSPAGSPTSTEEGSPAGSPTSTEEGTSESATPESGPGTSTEPSEGSAPGMDSDETGFEHSGLWVSVLAGLLLGACQAHPIPDSSPLLQFGGQVRQRYLYTDDAQQTEAHLEIREDGTVGGAADQSPESLLQLKALKPGVIQILGVKTSRFLCQRPDGALYGSLHFDPEACSFRELLLEDGYNVYQSEAHGLPLHLPGNKSPHRDPAPRGPARFLPLPGLPPALPEPPGILAPQPPDVGSSDPLSMVGPSQGRSPSYAS

SEQ ID NO: 1931 - protein, 936 aa, Artificial Sequence
  Description of Artificial Sequence: Synthetic polypeptide
EESQKKLPSSRITCPQGSVAYGSYCYSLILIPQTWSNAELSCQMHFSGHLAFLLSTGEITFVSSLVKNSLTAYQYIWIGLHDPSHGTLPNGSGWKWSSSNVLTFYNWERNPSIAADRGYCAVLSQKSGFQKWRDFNCENELPYICKFKVGGSPAGSPTSTEEGTSESATPESGPGTSTEPSEGSAPGSPAGSPTSTEEGTSTEPSEGSAPGTSTEPSEGSAPGTSESATPESGPGSEPATSGSETPGSEPATSGSETPGSPAGSPTSTEEGTSESATPESGPGTSTEPSEGSAPGTSTEPSEGSAPGSPAGSPTSTEEGTSTEPSEGSAPGTSTEPSEGSAPGTSESATPESGPGTSTEPSEGSAPGTSESATPESGPGSEPATSGSETPGTSTEPSEGSAPGTSTEPSEGSAPGTSESATPESGPGTSESATPESGPGSPAGSPTSTEEGTSESATPESGPGSEPATSGSETPGTSESATPESGPGTSTEPSEGSAPGTSTEPSEGSAPGTSTEPSEGSAPGTSTEPSEGSAPGTSTEPSEGSAPGTSTEPSEGSAPGSPAGSPTSTEEGTSTEPSEGSAPGTSESATPESGPGSEPATSGSETPGTSESATPESGPGSEPATSGSETPGTSESATPESGPGTSTEPSEGSAPGTSESATPESGPGSPAGSPTSTEEGSPAGSPTSTEEGSPAGSPTSTEEGTSESATPESGPGTSTEPSEGSAPGMDSDETGFEHSGLWVSVLAGLLLGACQAHPIPDSSPLLQFGGQVRQRYLYTDDAQQTEAHLEIREDGTVGGAADQSPESLLQLKALKPGVIQILGVKTSRFLCQRPDGALYGSLHFDPEACSFRELLLEDGYNVYQSEAHGLPLHLPGNKSPHRDPAPRGPARFLPLPGLPPALPEPPGILAPQPPDVGSSDPLSMVGPSQGRSPSYAS

SEQ ID NO: 1932 - protein, 834 aa, Artificial Sequence
  Description of Artificial Sequence: Synthetic polypeptide
TQAQLLRVGCVLGTCQVQNLSHRLWQLMGPAGRQDSAPVDPSSPHSYGGSPAGSPTSTEEGTSESATPESGPGTSTEPSEGSAPGSPAGSPTSTEEGTSTEPSEGSAPGTSTEPSEGSAPGTSESATPESGPGSEPATSGSETPGSEPATSGSETPGSPAGSPTSTEEGTSESATPESGPGTSTEPSEGSAPGTSTEPSEGSAPGSPAGSPTSTEEGTSTEPSEGSAPGTSTEPSEGSAPGTSESATPESGPGTSTEPSEGSAPGTSESATPESGPGSEPATSGSETPGTSTEPSEGSAPGTSTEPSEGSAPGTSESATPESGPGTSESATPESGPGSPAGSPTSTEEGTSESATPESGPGSEPATSGSETPGTSESATPESGPGTSTEPSEGSAPGTSTEPSEGSAPGTSTEPSEGSAPGTSTEPSEGSAPGTSTEPSEGSAPGTSTEPSEGSAPGSPAGSPTSTEEGTSTEPSEGSAPGTSESATPESGPGSEPATSGSETPGTSESATPESGPGSEPATSGSETPGTSESATPESGPGTSTEPSEGSAPGTSESATPESGPGSPAGSPTSTEEGSPAGSPTSTEEGSPAGSPTSTEEGTSESATPESGPGTSTEPSEGSAPGMDSDETGFEHSGLWVSVLAGLLLGACQAHPIPDSSPLLQFGGQVRQRYLYTDDAQQTEAHLEIREDGTVGGAADQSPESLLQLKALKPGVIQILGVKTSRFLCQRPDGALYGSLHFDPEACSFRELLLEDGYNVYQSEAHGLPLHLPGNKSPHRDPAPRGPARFLPLPGLPPALPEPPGILAPQPPDVGSSDPLSMVGPSQGRSPSYAS

SEQ ID NO: 1933 - protein, 933 aa, Artificial Sequence
  Description of Artificial Sequence: Synthetic polypeptide
VPIQKVQDDTKTLIKTIVTRINDISHTQSVSSKQKVTGLDFIPGLHPILTLSKMDQTLAVYQQILTSMPSRNVIQISNDLENLRDLLHVLAFSKSCHLPWASGLETLDSLGGVLEASGYSTEVVALSRLQGSLQDMLWQLDLSPGCGGSPAGSPTSTEEGTSESATPESGPGTSTEPSEGSAPGSPAGSPTSTEEGTSTEPSEGSAPGTSTEPSEGSAPGTSESATPESGPGSEPATSGSETPGSEPATSGSETPGSPAGSPTSTEEGTSESATPESGPGTSTEPSEGSAPGTSTEPSEGSAPGSPAGSPTSTEEGTSTEPSEGSAPGTSTEPSEGSAPGTSESATPESGPGTSTEPSEGSAPGTSESATPESGPGSEPATSGSETPGTSTEPSEGSAPGTSTEPSEGSAPGTSESATPESGPGTSESATPESGPGSPAGSPTSTEEGTSESATPESGPGSEPATSGSETPGTSESATPESGPGTSTEPSEGSAPGTSTEPSEGSAPGTSTEPSEGSAPGTSTEPSEGSAPGTSTEPSEGSAPGTSTEPSEGSAPGSPAGSPTSTEEGTSTEPSEGSAPGTSESATPESGPGSEPATSGSETPGTSESATPESGPGSEPATSGSETPGTSESATPESGPGTSTEPSEGSAPGTSESATPESGPGSPAGSPTSTEEGSPAGSPTSTEEGSPAGSPTSTEEGTSESATPESGPGTSTEPSEGSAPGMDSDETGFEHSGLWVSVLAGLLLGACQAHPIPDSSPLLQFGGQVRQRYLYTDDAQQTEAHLEIREDGTVGGAADQSPESLLQLKALKPGVIQILGVKTSRFLCQRPDGALYGSLHFDPEACSFRELLLEDGYNVYQSEAHGLPLHLPGNKSPHRDPAPRGPARFLPLPGLPPALPEPPGILAPQPPDVGSSDPLSMVGPSQGRSPSYAS

SEQ ID NO: 1934 - protein, 812 aa, Artificial Sequence
  Description of Artificial Sequence: Synthetic polypeptide
FRVDEEFQSPFASQSRGYFLFRPRNGGSPAGSPTSTEEGTSESATPESGPGTSTEPSEGSAPGSPAGSPTSTEEGTSTEPSEGSAPGTSTEPSEGSAPGTSESATPESGPGSEPATSGSETPGSEPATSGSETPGSPAGSPTSTEEGTSESATPESGPGTSTEPSEGSAPGTSTEPSEGSAPGSPAGSPTSTEEGTSTEPSEGSAPGTSTEPSEGSAPGTSESATPESGPGTSTEPSEGSAPGTSESATPESGPGSEPATSGSETPGTSTEPSEGSAPGTSTEPSEGSAPGTSESATPESGPGTSESATPESGPGSPAGSPTSTEEGTSESATPESGPGSEPATSGSETPGTSESATPESGPGTSTEPSEGSAPGTSTEPSEGSAPGTSTEPSEGSAPGTSTEPSEGSAPGTSTEPSEGSAPGTSTEPSEGSAPGSPAGSPTSTEEGTSTEPSEGSAPGTSESATPESGPGSEPATSGSETPGTSESATPESGPGSEPATSGSETPGTSESATPESGPGTSTEPSEGSAPGTSESATPESGPGSPAGSPTSTEEGSPAGSPTSTEEGSPAGSPTSTEEGTSESATPESGPGTSTEPSEGSAPGMDSDETGFEHSGLWVSVLAGLLLGACQAHPIPDSSPLLQFGGQVRQRYLYTDDAQQTEAHLEIREDGTVGGAADQSPESLLQLKALKPGVIQILGVKTSRFLCQRPDGALYGSLHFDPEACSFRELLLEDGYNVYQSEAHGLPLHLPGNKSPHRDPAPRGPARFLPLPGLPPALPEPPGILAPQPPDVGSSDPLSMVGPSQGRSPSYAS

SEQ ID NO: 1935 - protein, 824 aa, Artificial Sequence
  Description of Artificial Sequence: Synthetic polypeptide
HSQGTFTSDYSKYLDSRRAQDFVQWLMNTKRNRNNIAGGSPAGSPTSTEEGTSESATPESGPGTSTEPSEGSAPGSPAGSPTSTEEGTSTEPSEGSAPGTSTEPSEGSAPGTSESATPESGPGSEPATSGSETPGSEPATSGSETPGSPAGSPTSTEEGTSESATPESGPGTSTEPSEGSAPGTSTEPSEGSAPGSPAGSPTSTEEGTSTEPSEGSAPGTSTEPSEGSAPGTSESATPESGPGTSTEPSEGSAPGTSESATPESGPGSEPATSGSETPGTSTEPSEGSAPGTSTEPSEGSAPGTSESATPESGPGTSESATPESGPGSPAGSPTSTEEGTSESATPESGPGSEPATSGSETPGTSESATPESGPGTSTEPSEGSAPGTSTEPSEGSAPGTSTEPSEGSAPGTSTEPSEGSAPGTSTEPSEGSAPGTSTEPSEGSAPGSPAGSPTSTEEGTSTEPSEGSAPGTSESATPESGPGSEPATSGSETPGTSESATPESGPGSEPATSGSETPGTSESATPESGPGTSTEPSEGSAPGTSESATPESGPGSPAGSPTSTEEGSPAGSPTSTEEGSPAGSPTSTEEGTSESATPESGPGTSTEPSEGSAPGMDSDETGFEHSGLWVSVLAGLLLGACQAHPIPDSSPLLQFGGQVRQRYLYTDDAQQTEAHLEIREDGTVGGAADQSPESLLQLKALKPGVIQILGVKTSRFLCQRPDGALYGSLHFDPEACSFRELLLEDGYNVYQSEAHGLPLHLPGNKSPHRDPAPRGPARFLPLPGLPPALPEPPGILAPQPPDVGSSDPLSMVGPSQGRSPSYAS

SEQ ID NO: 1936 - protein, 824 aa, Artificial Sequence
  Description of Artificial Sequence: Synthetic polypeptide
KCNTATCATNRLANFLVHSSNNFGPILPPTNVGSNTYGGSPAGSPTSTEEGTSESATPESGPGTSTEPSEGSAPGSPAGSPTSTEEGTSTEPSEGSAPGTSTEPSEGSAPGTSESATPESGPGSEPATSGSETPGSEPATSGSETPGSPAGSPTSTEEGTSESATPESGPGTSTEPSEGSAPGTSTEPSEGSAPGSPAGSPTSTEEGTSTEPSEGSAPGTSTEPSEGSAPGTSESATPESGPGTSTEPSEGSAPGTSESATPESGPGSEPATSGSETPGTSTEPSEGSAPGTSTEPSEGSAPGTSESATPESGPGTSESATPESGPGSPAGSPTSTEEGTSESATPESGPGSEPATSGSETPGTSESATPESGPGTSTEPSEGSAPGTSTEPSEGSAPGTSTEPSEGSAPGTSTEPSEGSAPGTSTEPSEGSAPGTSTEPSEGSAPGSPAGSPTSTEEGTSTEPSEGSAPGTSESATPESGPGSEPATSGSETPGTSESATPESGPGSEPATSGSETPGTSESATPESGPGTSTEPSEGSAPGTSESATPESGPGSPAGSPTSTEEGSPAGSPTSTEEGSPAGSPTSTEEGTSESATPESGPGTSTEPSEGSAPGMDSDETGFEHSGLWVSVLAGLLLGACQAHPIPDSSPLLQFGGQVRQRYLYTDDAQQTEAHLEIREDGTVGGAADQSPESLLQLKALKPGVIQILGVKTSRFLCQRPDGALYGSLHFDPEACSFRELLLEDGYNVYQSEAHGLPLHLPGNKSPHRDPAPRGPARFLPLPGLPPALPEPPGILAPQPPDVGSSDPLSMVGPSQGRSPSYAS

SEQ ID NO: 1937 - protein, 823 aa, Artificial Sequence
  Description of Artificial Sequence: Synthetic polypeptide
YPIKPEAPGEDASPEELNRYYASLRHYLNLVTRQRYGGSPAGSPTSTEEGTSESATPESGPGTSTEPSEGSAPGSPAGSPTSTEEGTSTEPSEGSAPGTSTEPSEGSAPGTSESATPESGPGSEPATSGSETPGSEPATSGSETPGSPAGSPTSTEEGTSESATPESGPGTSTEPSEGSAPGTSTEPSEGSAPGSPAGSPTSTEEGTSTEPSEGSAPGTSTEPSEGSAPGTSESATPESGPGTSTEPSEGSAPGTSESATPESGPGSEPATSGSETPGTSTEPSEGSAPGTSTEPSEGSAPGTSESATPESGPGTSESATPESGPGSPAGSPTSTEEGTSESATPESGPGSEPATSGSETPGTSESATPESGPGTSTEPSEGSAPGTSTEPSEGSAPGTSTEPSEGSAPGTSTEPSEGSAPGTSTEPSEGSAPGTSTEPSEGSAPGSPAGSPTSTEEGTSTEPSEGSAPGTSESATPESGPGSEPATSGSETPGTSESATPESGPGSEPATSGSETPGTSESATPESGPGTSTEPSEGSAPGTSESATPESGPGSPAGSPTSTEEGSPAGSPTSTEEGSPAGSPTSTEEGTSESATPESGPGTSTEPSEGSAPGMDSDETGFEHSGLWVSVLAGLLLGACQAHPIPDSSPLLQFGGQVRQRYLYTDDAQQTEAHLEIREDGTVGGAADQSPESLLQLKALKPGVIQILGVKTSRFLCQRPDGALYGSLHFDPEACSFRELLLEDGYNVYQSEAHGLPLHLPGNKSPHRDPAPRGPARFLPLPGLPPALPEPPGILAPQPPDVGSSDPLSMVGPSQGRSPSYAS

SEQ ID NO: 1938 - protein, 828 aa, Artificial Sequence
  Description of Artificial Sequence: Synthetic polypeptide
IVLSLDVPIGLLQILLEQARARAAREQATTNARILARVGHCGGSPAGSPTSTEEGTSESATPESGPGTSTEPSEGSAPGSPAGSPTSTEEGTSTEPSEGSAPGTSTEPSEGSAPGTSESATPESGPGSEPATSGSETPGSEPATSGSETPGSPAGSPTSTEEGTSESATPESGPGTSTEPSEGSAPGTSTEPSEGSAPGSPAGSPTSTEEGTSTEPSEGSAPGTSTEPSEGSAPGTSESATPESGPGTSTEPSEGSAPGTSESATPESGPGSEPATSGSETPGTSTEPSEGSAPGTSTEPSEGSAPGTSESATPESGPGTSESATPESGPGSPAGSPTSTEEGTSESATPESGPGSEPATSGSETPGTSESATPESGPGTSTEPSEGSAPGTSTEPSEGSAPGTSTEPSEGSAPGTSTEPSEGSAPGTSTEPSEGSAPGTSTEPSEGSAPGSPAGSPTSTEEGTSTEPSEGSAPGTSESATPESGPGSEPATSGSETPGTSESATPESGPGSEPATSGSETPGTSESATPESGPGTSTEPSEGSAPGTSESATPESGPGSPAGSPTSTEEGSPAGSPTSTEEGSPAGSPTSTEEGTSESATPESGPGTSTEPSEGSAPGMDSDETGFEHSGLWVSVLAGLLLGACQAHPIPDSSPLLQFGGQVRQRYLYTDDAQQTEAHLEIREDGTVGGAADQSPESLLQLKALKPGVIQILGVKTSRFLCQRPDGALYGSLHFDPEACSFRELLLEDGYNVYQSEAHGLPLHLPGNKSPHRDPAPRGPARFLPLPGLPPALPEPPGILAPQPPDVGSSDPLSMVGPSQGRSPSYAS

SEQ ID NO: 1939 - protein, 825 aa, Artificial Sequence
  Description of Artificial Sequence: Synthetic polypeptide
FTLSLDVPTNIMNLLFNIAKAKNLRAQAAANAHLMAQIGGSPAGSPTSTEEGTSESATPESGPGTSTEPSEGSAPGSPAGSPTSTEEGTSTEPSEGSAPGTSTEPSEGSAPGTSESATPESGPGSEPATSGSETPGSEPATSGSETPGSPAGSPTSTEEGTSESATPESGPGTSTEPSEGSAPGTSTEPSEGSAPGSPAGSPTSTEEGTSTEPSEGSAPGTSTEPSEGSAPGTSESATPESGPGTSTEPSEGSAPGTSESATPESGPGSEPATSGSETPGTSTEPSEGSAPGTSTEPSEGSAPGTSESATPESGPGTSESATPESGPGSPAGSPTSTEEGTSESATPESGPGSEPATSGSETPGTSESATPESGPGTSTEPSEGSAPGTSTEPSEGSAPGTSTEPSEGSAPGTSTEPSEGSAPGTSTEPSEGSAPGTSTEPSEGSAPGSPAGSPTSTEEGTSTEPSEGSAPGTSESATPESGPGSEPATSGSETPGTSESATPESGPGSEPATSGSETPGTSESATPESGPGTSTEPSEGSAPGTSESATPESGPGSPAGSPTSTEEGSPAGSPTSTEEGSPAGSPTSTEEGTSESATPESGPGTSTEPSEGSAPGMDSDETGFEHSGLWVSVLAGLLLGACQAHPIPDSSPLLQFGGQVRQRYLYTDDAQQTEAHLEIREDGTVGGAADQSPESLLQLKALKPGVIQILGVKTSRFLCQRPDGALYGSLHFDPEACSFRELLLEDGYNVYQSEAHGLPLHLPGNKSPHRDPAPRGPARFLPLPGLPPALPEPPGILAPQPPDVGSSDPLSMVGPSQGRSPSYAS

SEQ ID NO: 1940 - protein, 634 aa, Artificial Sequence
  Description of Artificial Sequence: Synthetic polypeptide
QLGPQGPPHLVADPSKKQGPWLEEEEEAYGWMDFGGSPAGSPTSTEEGTSESATPESGPGTSTEPSEGSAPGSPAGSPTSTEEGTSTEPSEGSAPGTSTEPSEGSAPGTSESATPESGPGSEPATSGSETPGSEPATSGSETPGSPAGSPTSTEEGTSESATPESGPGTSTEPSEGSAPGTSTEPSEGSAPGSPAGSPTSTEEGTSTEPSEGSAPGTSTEPSEGSAPGTSESATPESGPGTSTEPSEGSAPGTSESATPESGPGSEPATSGSETPGTSTEPSEGSAPGTSTEPSEGSAPGTSESATPESGPGTSESATPESGPGSPAGSPTSTEEGTSESATPESGPGSEPATSGSETPGTSESATPESGPGTSTEPSEGSAPGTSTEPSEGSAPGTSTEPSEGSAPGTSTEPSEGSAPGTSTEPSEGSAPGTSTEPSEGSAPGSPAGSPTSTEEGTSTEPSEGSAPGTSESATPESGPGSEPATSGSETPGTSESATPESGPGSEPATSGSETPGTSESATPESGPGTSTEPSEGSAPGTSESATPESGPGSPAGSPTSTEEGSPAGSPTSTEEGSPAGSPTSTEEGTSESATPESGPGTSTEPSEGSAPGDPSKKQGPWLEEEEEAYGWMDF

SEQ ID NO: 1941 - protein, 654 aa, Artificial Sequence
  Description of Artificial Sequence: Synthetic polypeptide
QLGPQGPPHLVADPSKKQGPWLEEEEEAYGWMDFGGSPAGSPTSTEEGTSESATPESGPGTSTEPSEGSAPGSPAGSPTSTEEGTSTEPSEGSAPGTSTEPSEGSAPGTSESATPESGPGSEPATSGSETPGSEPATSGSETPGSPAGSPTSTEEGTSESATPESGPGTSTEPSEGSAPGTSTEPSEGSAPGSPAGSPTSTEEGTSTEPSEGSAPGTSTEPSEGSAPGTSESATPESGPGTSTEPSEGSAPGTSESATPESGPGSEPATSGSETPGTSTEPSEGSAPGTSTEPSEGSAPGTSESATPESGPGTSESATPESGPGSPAGSPTSTEEGTSESATPESGPGSEPATSGSETPGTSESATPESGPGTSTEPSEGSAPGTSTEPSEGSAPGTSTEPSEGSAPGTSTEPSEGSAPGTSTEPSEGSAPGTSTEPSEGSAPGSPAGSPTSTEEGTSTEPSEGSAPGTSESATPESGPGSEPATSGSETPGTSESATPESGPGSEPATSGSETPGTSESATPESGPGTSTEPSEGSAPGTSESATPESGPGSPAGSPTSTEEGSPAGSPTSTEEGSPAGSPTSTEEGTSESATPESGPGTSTEPSEGSAPGYAEGTFISDYSIAMDKIHQQDFVNWLLAQKGKKNDWKHNITQ

SEQ ID NO: 1942 - protein, 641 aa, Artificial Sequence
  Description of Artificial Sequence: Synthetic polypeptide
QLGPQGPPHLVADPSKKQGPWLEEEEEAYGWMDFGGSPAGSPTSTEEGTSESATPESGPGTSTEPSEGSAPGSPAGSPTSTEEGTSTEPSEGSAPGTSTEPSEGSAPGTSESATPESGPGSEPATSGSETPGSEPATSGSETPGSPAGSPTSTEEGTSESATPESGPGTSTEPSEGSAPGTSTEPSEGSAPGSPAGSPTSTEEGTSTEPSEGSAPGTSTEPSEGSAPGTSESATPESGPGTSTEPSEGSAPGTSESATPESGPGSEPATSGSETPGTSTEPSEGSAPGTSTEPSEGSAPGTSESATPESGPGTSESATPESGPGSPAGSPTSTEEGTSESATPESGPGSEPATSGSETPGTSESATPESGPGTSTEPSEGSAPGTSTEPSEGSAPGTSTEPSEGSAPGTSTEPSEGSAPGTSTEPSEGSAPGTSTEPSEGSAPGSPAGSPTSTEEGTSTEPSEGSAPGTSESATPESGPGSEPATSGSETPGTSESATPESGPGSEPATSGSETPGTSESATPESGPGTSTEPSEGSAPGTSESATPESGPGSPAGSPTSTEEGSPAGSPTSTEEGSPAGSPTSTEEGTSESATPESGPGTSTEPSEGSAPGHSQGTFTSDYSKYLDSRRAQDFVQWLMNT

SEQ ID NO: 1943 - protein, 649 aa, Artificial Sequence
  Description of Artificial Sequence: Synthetic polypeptide
QLGPQGPPHLVADPSKKQGPWLEEEEEAYGWMDFGGSPAGSPTSTEEGTSESATPESGPGTSTEPSEGSAPGSPAGSPTSTEEGTSTEPSEGSAPGTSTEPSEGSAPGTSESATPESGPGSEPATSGSETPGSEPATSGSETPGSPAGSPTSTEEGTSESATPESGPGTSTEPSEGSAPGTSTEPSEGSAPGSPAGSPTSTEEGTSTEPSEGSAPGTSTEPSEGSAPGTSESATPESGPGTSTEPSEGSAPGTSESATPESGPGSEPATSGSETPGTSTEPSEGSAPGTSTEPSEGSAPGTSESATPESGPGTSESATPESGPGSPAGSPTSTEEGTSESATPESGPGSEPATSGSETPGTSESATPESGPGTSTEPSEGSAPGTSTEPSEGSAPGTSTEPSEGSAPGTSTEPSEGSAPGTSTEPSEGSAPGTSTEPSEGSAPGSPAGSPTSTEEGTSTEPSEGSAPGTSESATPESGPGSEPATSGSETPGTSESATPESGPGSEPATSGSETPGTSESATPESGPGTSTEPSEGSAPGTSESATPESGPGSPAGSPTSTEEGSPAGSPTSTEEGSPAGSPTSTEEGTSESATPESGPGTSTEPSEGSAPGHDEFERHAEGTFTSDVSSTLEGQAALEFIAWLVKGRG

SEQ ID NO: 1944 - protein, 642 aa, Artificial Sequence
  Description of Artificial Sequence: Synthetic polypeptide
QLGPQGPPHLVADPSKKQGPWLEEEEEAYGWMDFGGSPAGSPTSTEEGTSESATPESGPGTSTEPSEGSAPGSPAGSPTSTEEGTSTEPSEGSAPGTSTEPSEGSAPGTSESATPESGPGSEPATSGSETPGSEPATSGSETPGSPAGSPTSTEEGTSESATPESGPGTSTEPSEGSAPGTSTEPSEGSAPGSPAGSPTSTEEGTSTEPSEGSAPGTSTEPSEGSAPGTSESATPESGPGTSTEPSEGSAPGTSESATPESGPGSEPATSGSETPGTSTEPSEGSAPGTSTEPSEGSAPGTSESATPESGPGTSESATPESGPGSPAGSPTSTEEGTSESATPESGPGSEPATSGSETPGTSESATPESGPGTSTEPSEGSAPGTSTEPSEGSAPGTSTEPSEGSAPGTSTEPSEGSAPGTSTEPSEGSAPGTSTEPSEGSAPGSPAGSPTSTEEGTSTEPSEGSAPGTSESATPESGPGSEPATSGSETPGTSESATPESGPGSEPATSGSETPGTSESATPESGPGTSTEPSEGSAPGTSESATPESGPGSPAGSPTSTEEGSPAGSPTSTEEGSPAGSPTSTEEGTSESATPESGPGTSTEPSEGSAPGHAEGTFTSDVSSYLEGQAALEFIAWLVKGR

SEQ ID NO: 1945 - protein, 645 aa, Artificial Sequence
  Description of Artificial Sequence: Synthetic polypeptide
QLGPQGPPHLVADPSKKQGPWLEEEEEAYGWMDFGGSPAGSPTSTEEGTSESATPESGPGTSTEPSEGSAPGSPAGSPTSTEEGTSTEPSEGSAPGTSTEPSEGSAPGTSESATPESGPGSEPATSGSETPGSEPATSGSETPGSPAGSPTSTEEGTSESATPESGPGTSTEPSEGSAPGTSTEPSEGSAPGSPAGSPTSTEEGTSTEPSEGSAPGTSTEPSEGSAPGTSESATPESGPGTSTEPSEGSAPGTSESATPESGPGSEPATSGSETPGTSTEPSEGSAPGTSTEPSEGSAPGTSESATPESGPGTSESATPESGPGSPAGSPTSTEEGTSESATPESGPGSEPATSGSETPGTSESATPESGPGTSTEPSEGSAPGTSTEPSEGSAPGTSTEPSEGSAPGTSTEPSEGSAPGTSTEPSEGSAPGTSTEPSEGSAPGSPAGSPTSTEEGTSTEPSEGSAPGTSESATPESGPGSEPATSGSETPGTSESATPESGPGSEPATSGSETPGTSESATPESGPGTSTEPSEGSAPGTSESATPESGPGSPAGSPTSTEEGSPAGSPTSTEEGSPAGSPTSTEEGTSESATPESGPGTSTEPSEGSAPGHADGSFSDEMNTILDNLAARDFINWLIETKITD

SEQ ID NO: 1946 - protein, 682 aa, Artificial Sequence
  Description of Artificial Sequence: Synthetic polypeptide
QLGPQGPPHLVADPSKKQGPWLEEEEEAYGWMDFGGSPAGSPTSTEEGTSESATPESGPGTSTEPSEGSAPGSPAGSPTSTEEGTSTEPSEGSAPGTSTEPSEGSAPGTSESATPESGPGSEPATSGSETPGSEPATSGSETPGSPAGSPTSTEEGTSESATPESGPGTSTEPSEGSAPGTSTEPSEGSAPGSPAGSPTSTEEGTSTEPSEGSAPGTSTEPSEGSAPGTSESATPESGPGTSTEPSEGSAPGTSESATPESGPGSEPATSGSETPGTSTEPSEGSAPGTSTEPSEGSAPGTSESATPESGPGTSESATPESGPGSPAGSPTSTEEGTSESATPESGPGSEPATSGSETPGTSESATPESGPGTSTEPSEGSAPGTSTEPSEGSAPGTSTEPSEGSAPGTSTEPSEGSAPGTSTEPSEGSAPGTSTEPSEGSAPGSPAGSPTSTEEGTSTEPSEGSAPGTSESATPESGPGSEPATSGSETPGTSESATPESGPGSEPATSGSETPGTSESATPESGPGTSTEPSEGSAPGTSESATPESGPGSPAGSPTSTEEGSPAGSPTSTEEGSPAGSPTSTEEGTSESATPESGPGTSTEPSEGSAPGGPETLCGAELVDALQFVCGDRGFYFNKPTGYGSSSRRAPQTGIVDECCFRSCDLRRLEMYCAPLKPAKSA

SEQ ID NO: 1947 - protein, 679 aa, Artificial Sequence
  Description of Artificial Sequence: Synthetic polypeptide
QLGPQGPPHLVADPSKKQGPWLEEEEEAYGWMDFGGSPAGSPTSTEEGTSESATPESGPGTSTEPSEGSAPGSPAGSPTSTEEGTSTEPSEGSAPGTSTEPSEGSAPGTSESATPESGPGSEPATSGSETPGSEPATSGSETPGSPAGSPTSTEEGTSESATPESGPGTSTEPSEGSAPGTSTEPSEGSAPGSPAGSPTSTEEGTSTEPSEGSAPGTSTEPSEGSAPGTSESATPESGPGTSTEPSEGSAPGTSESATPESGPGSEPATSGSETPGTSTEPSEGSAPGTSTEPSEGSAPGTSESATPESGPGTSESATPESGPGSPAGSPTSTEEGTSESATPESGPGSEPATSGSETPGTSESATPESGPGTSTEPSEGSAPGTSTEPSEGSAPGTSTEPSEGSAPGTSTEPSEGSAPGTSTEPSEGSAPGTSTEPSEGSAPGSPAGSPTSTEEGTSTEPSEGSAPGTSESATPESGPGSEPATSGSETPGTSESATPESGPGSEPATSGSETPGTSESATPESGPGTSTEPSEGSAPGTSESATPESGPGSPAGSPTSTEEGSPAGSPTSTEEGSPAGSPTSTEEGTSESATPESGPGTSTEPSEGSAPGAYRPSETLCGGELVDTLQFVCGDRGFYFSRPASRVSRRSRGIVEECCFRSCDLALLETYCATPAKSE

SEQ ID NO: 1948 - protein, 761 aa, Artificial Sequence
  Description of Artificial Sequence: Synthetic polypeptide
QLGPQGPPHLVADPSKKQGPWLEEEEEAYGWMDFGGSPAGSPTSTEEGTSESATPESGPGTSTEPSEGSAPGSPAGSPTSTEEGTSTEPSEGSAPGTSTEPSEGSAPGTSESATPESGPGSEPATSGSETPGSEPATSGSETPGSPAGSPTSTEEGTSESATPESGPGTSTEPSEGSAPGTSTEPSEGSAPGSPAGSPTSTEEGTSTEPSEGSAPGTSTEPSEGSAPGTSESATPESGPGTSTEPSEGSAPGTSESATPESGPGSEPATSGSETPGTSTEPSEGSAPGTSTEPSEGSAPGTSESATPESGPGTSESATPESGPGSPAGSPTSTEEGTSESATPESGPGSEPATSGSETPGTSESATPESGPGTSTEPSEGSAPGTSTEPSEGSAPGTSTEPSEGSAPGTSTEPSEGSAPGTSTEPSEGSAPGTSTEPSEGSAPGSPAGSPTSTEEGTSTEPSEGSAPGTSESATPESGPGSEPATSGSETPGTSESATPESGPGSEPATSGSETPGTSESATPESGPGTSTEPSEGSAPGTSESATPESGPGSPAGSPTSTEEGSPAGSPTSTEEGSPAGSPTSTEEGTSESATPESGPGTSTEPSEGSAPGEESQKKLPSSRITCPQGSVAYGSYCYSLILIPQTWSNAELSCQMHFSGHLAFLLSTGEITFVSSLVKNSLTAYQYIWIGLHDPSHGTLPNGSGWKWSSSNVLTFYNWERNPSIAADRGYCAVLSQKSGFQKWRDFNCENELPYICKFKV

SEQ ID NO: 1949 - protein, 659 aa, Artificial Sequence
  Description of Artificial Sequence: Synthetic polypeptide
QLGPQGPPHLVADPSKKQGPWLEEEEEAYGWMDFGGSPAGSPTSTEEGTSESATPESGPGTSTEPSEGSAPGSPAGSPTSTEEGTSTEPSEGSAPGTSTEPSEGSAPGTSESATPESGPGSEPATSGSETPGSEPATSGSETPGSPAGSPTSTEEGTSESATPESGPGTSTEPSEGSAPGTSTEPSEGSAPGSPAGSPTSTEEGTSTEPSEGSAPGTSTEPSEGSAPGTSESATPESGPGTSTEPSEGSAPGTSESATPESGPGSEPATSGSETPGTSTEPSEGSAPGTSTEPSEGSAPGTSESATPESGPGTSESATPESGPGSPAGSPTSTEEGTSESATPESGPGSEPATSGSETPGTSESATPESGPGTSTEPSEGSAPGTSTEPSEGSAPGTSTEPSEGSAPGTSTEPSEGSAPGTSTEPSEGSAPGTSTEPSEGSAPGSPAGSPTSTEEGTSTEPSEGSAPGTSESATPESGPGSEPATSGSETPGTSESATPESGPGSEPATSGSETPGTSESATPESGPGTSTEPSEGSAPGTSESATPESGPGSPAGSPTSTEEGSPAGSPTSTEEGSPAGSPTSTEEGTSESATPESGPGTSTEPSEGSAPGTQAQLLRVGCVLGTCQVQNLSHRLWQLMGPAGRQDSAPVDPSSPHSY

SEQ ID NO: 1950 - protein, 758 aa, Artificial Sequence
  Description of Artificial Sequence: Synthetic polypeptide
QLGPQGPPHLVADPSKKQGPWLEEEEEAYGWMDFGGSPAGSPTSTEEGTSESATPESGPGTSTEPSEGSAPGSPAGSPTSTEEGTSTEPSEGSAPGTSTEPSEGSAPGTSESATPESGPGSEPATSGSETPGSEPATSGSETPGSPAGSPTSTEEGTSESATPESGPGTSTEPSEGSAPGTSTEPSEGSAPGSPAGSPTSTEEGTSTEPSEGSAPGTSTEPSEGSAPGTSESATPESGPGTSTEPSEGSAPGTSESATPESGPGSEPATSGSETPGTSTEPSEGSAPGTSTEPSEGSAPGTSESATPESGPGTSESATPESGPGSPAGSPTSTEEGTSESATPESGPGSEPATSGSETPGTSESATPESGPGTSTEPSEGSAPGTSTEPSEGSAPGTSTEPSEGSAPGTSTEPSEGSAPGTSTEPSEGSAPGTSTEPSEGSAPGSPAGSPTSTEEGTSTEPSEGSAPGTSESATPESGPGSEPATSGSETPGTSESATPESGPGSEPATSGSETPGTSESATPESGPGTSTEPSEGSAPGTSESATPESGPGSPAGSPTSTEEGSPAGSPTSTEEGSPAGSPTSTEEGTSESATPESGPGTSTEPSEGSAPGVPIQKVQDDTKTLIKTIVTRINDISHTQSVSSKQKVTGLDFIPGLHPILTLSKMDQTLAVYQQILTSMPSRNVIQISNDLENLRDLLHVLAFSKSCHLPWASGLETLDSLGGVLEASGYSTEVVALSRLQGSLQDMLWQLDLSPGC

SEQ ID NO: 1951 - protein, 637 aa, Artificial Sequence
  Description of Artificial Sequence: Synthetic polypeptide
QLGPQGPPHLVADPSKKQGPWLEEEEEAYGWMDFGGSPAGSPTSTEEGTSESATPESGPGTSTEPSEGSAPGSPAGSPTSTEEGTSTEPSEGSAPGTSTEPSEGSAPGTSESATPESGPGSEPATSGSETPGSEPATSGSETPGSPAGSPTSTEEGTSESATPESGPGTSTEPSEGSAPGTSTEPSEGSAPGSPAGSPTSTEEGTSTEPSEGSAPGTSTEPSEGSAPGTSESATPESGPGTSTEPSEGSAPGTSESATPESGPGSEPATSGSETPGTSTEPSEGSAPGTSTEPSEGSAPGTSESATPESGPGTSESATPESGPGSPAGSPTSTEEGTSESATPESGPGSEPATSGSETPGTSESATPESGPGTSTEPSEGSAPGTSTEPSEGSAPGTSTEPSEGSAPGTSTEPSEGSAPGTSTEPSEGSAPGTSTEPSEGSAPGSPAGSPTSTEEGTSTEPSEGSAPGTSESATPESGPGSEPATSGSETPGTSESATPESGPGSEPATSGSETPGTSESATPESGPGTSTEPSEGSAPGTSESATPESGPGSPAGSPTSTEEGSPAGSPTSTEEGSPAGSPTSTEEGTSESATPESGPGTSTEPSEGSAPGFRVDEEFQSPFASQSRGYFLFRPRN

SEQ ID NO: 1952 - protein, 649 aa, Artificial Sequence
  Description of Artificial Sequence: Synthetic polypeptide
QLGPQGPPHLVADPSKKQGPWLEEEEEAYGWMDFGGSPAGSPTSTEEGTSESATPESGPGTSTEPSEGSAPGSPAGSPTSTEEGTSTEPSEGSAPGTSTEPSEGSAPGTSESATPESGPGSEPATSGSETPGSEPATSGSETPGSPAGSPTSTEEGTSESATPESGPGTSTEPSEGSAPGTSTEPSEGSAPGSPAGSPTSTEEGTSTEPSEGSAPGTSTEPSEGSAPGTSESATPESGPGTSTEPSEGSAPGTSESATPESGPGSEPATSGSETPGTSTEPSEGSAPGTSTEPSEGSAPGTSESATPESGPGTSESATPESGPGSPAGSPTSTEEGTSESATPESGPGSEPATSGSETPGTSESATPESGPGTSTEPSEGSAPGTSTEPSEGSAPGTSTEPSEGSAPGTSTEPSEGSAPGTSTEPSEGSAPGTSTEPSEGSAPGSPAGSPTSTEEGTSTEPSEGSAPGTSESATPESGPGSEPATSGSETPGTSESATPESGPGSEPATSGSETPGTSESATPESGPGTSTEPSEGSAPGTSESATPESGPGSPAGSPTSTEEGSPAGSPTSTEEGSPAGSPTSTEEGTSESATPESGPGTSTEPSEGSAPGHSQGTFTSDYSKYLDSRRAQDFVQWLMNTKRNRNNIA

SEQ ID NO: 1953 - protein, 649 aa, Artificial Sequence; identical to SEQ ID NO: 1765
  Description of Artificial Sequence: Synthetic polypeptide

SEQ ID NO: 1954 - protein, 648 aa, Artificial Sequence
  Description of Artificial Sequence: Synthetic polypeptide
QLGPQGPPHLVADPSKKQGPWLEEEEEAYGWMDFGGSPAGSPTSTEEGTSESATPESGPGTSTEPSEGSAPGSPAGSPTSTEEGTSTEPSEGSAPGTSTEPSEGSAPGTSESATPESGPGSEPATSGSETPGSEPATSGSETPGSPAGSPTSTEEGTSESATPESGPGTSTEPSEGSAPGTSTEPSEGSAPGSPAGSPTSTEEGTSTEPSEGSAPGTSTEPSEGSAPGTSESATPESGPGTSTEPSEGSAPGTSESATPESGPGSEPATSGSETPGTSTEPSEGSAPGTSTEPSEGSAPGTSESATPESGPGTSESATPESGPGSPAGSPTSTEEGTSESATPESGPGSEPATSGSETPGTSESATPESGPGTSTEPSEGSAPGTSTEPSEGSAPGTSTEPSEGSAPGTSTEPSEGSAPGTSTEPSEGSAPGTSTEPSEGSAPGSPAGSPTSTEEGTSTEPSEGSAPGTSESATPESGPGSEPATSGSETPGTSESATPESGPGSEPATSGSETPGTSESATPESGPGTSTEPSEGSAPGTSESATPESGPGSPAGSPTSTEEGSPAGSPTSTEEGSPAGSPTSTEEGTSESATPESGPGTSTEPSEGSAPGYPIKPEAPGEDASPEELNRYYASLRHYLNLVTRQRY

SEQ ID NO: 1955 - protein, 653 aa, Artificial Sequence
  Description of Artificial Sequence: Synthetic polypeptide
QLGPQGPPHLVADPSKKQGPWLEEEEEAYGWMDFGGSPAGSPTSTEEGTSESATPESGPGTSTEPSEGSAPGSPAGSPTSTEEGTSTEPSEGSAPGTSTEPSEGSAPGTSESATPESGPGSEPATSGSETPGSEPATSGSETPGSPAGSPTSTEEGTSESATPESGPGTSTEPSEGSAPGTSTEPSEGSAPGSPAGSPTSTEEGTSTEPSEGSAPGTSTEPSEGSAPGTSESATPESGPGTSTEPSEGSAPGTSESATPESGPGSEPATSGSETPGTSTEPSEGSAPGTSTEPSEGSAPGTSESATPESGPGTSESATPESGPGSPAGSPTSTEEGTSESATPESGPGSEPATSGSETPGTSESATPESGPGTSTEPSEGSAPGTSTEPSEGSAPGTSTEPSEGSAPGTSTEPSEGSAPGTSTEPSEGSAPGTSTEPSEGSAPGSPAGSPTSTEEGTSTEPSEGSAPGTSESATPESGPGSEPATSGSETPGTSESATPESGPGSEPATSGSETPGTSESATPESGPGTSTEPSEGSAPGTSESATPESGPGSPAGSPTSTEEGSPAGSPTSTEEGSPAGSPTSTEEGTSESATPESGPGTSTEPSEGSAPGIVLSLDVPIGLLQILLEQARARAAREQATTNARILARVGHC

SEQ ID NO: 1956 - protein, 650 aa, Artificial Sequence
  Description of Artificial Sequence: Synthetic polypeptide
QLGPQGPPHLVADPSKKQGPWLEEEEEAYGWMDFGGSPAGSPTSTEEGTSESATPESGPGTSTEPSEGSAPGSPAGSPTSTEEGTSTEPSEGSAPGTSTEPSEGSAPGTSESATPESGPGSEPATSGSETPGSEPATSGSETPGSPAGSPTSTEEGTSESATPESGPGTSTEPSEGSAPGTSTEPSEGSAPGSPAGSPTSTEEGTSTEPSEGSAPGTSTEPSEGSAPGTSESATPESGPGTSTEPSEGSAPGTSESATPESGPGSEPATSGSETPGTSTEPSEGSAPGTSTEPSEGSAPGTSESATPESGPGTSESATPESGPGSPAGSPTSTEEGTSESATPESGPGSEPATSGSETPGTSESATPESGPGTSTEPSEGSAPGTSTEPSEGSAPGTSTEPSEGSAPGTSTEPSEGSAPGTSTEPSEGSAPGTSTEPSEGSAPGSPAGSPTSTEEGTSTEPSEGSAPGTSESATPESGPGSEPATSGSETPGTSESATPESGPGSEPATSGSETPGTSESATPESGPGTSTEPSEGSAPGTSESATPESGPGSPAGSPTSTEEGSPAGSPTSTEEGSPAGSPTSTEEGTSESATPESGPGTSTEPSEGSAPGFTLSLDVPTNIMNLLFNIAKAKNLRAQAAANAHLMAQI

SEQ ID NO: 1957 - protein, 647 aa, Artificial Sequence
  Description of Artificial Sequence: Synthetic polypeptide
DPSKKQGPWLEEEEEAYGWMDFGGSPAGSPTSTEEGTSESATPESGPGTSTEPSEGSAPGSPAGSPTSTEEGTSTEPSEGSAPGTSTEPSEGSAPGTSESATPESGPGSEPATSGSETPGSEPATSGSETPGSPAGSPTSTEEGTSESATPESGPGTSTEPSEGSAPGTSTEPSEGSAPGSPAGSPTSTEEGTSTEPSEGSAPGTSTEPSEGSAPGTSESATPESGPGTSTEPSEGSAPGTSESATPESGPGSEPATSGSETPGTSTEPSEGSAPGTSTEPSEGSAPGTSESATPESGPGTSESATPESGPGSPAGSPTSTEEGTSESATPESGPGSEPATSGSETPGTSESATPESGPGTSTEPSEGSAPGTSTEPSEGSAPGTSTEPSEGSAPGTSTEPSEGSAPGTSTEPSEGSAPGTSTEPSEGSAPGSPAGSPTSTEEGTSTEPSEGSAPGTSESATPESGPGSEPATSGSETPGTSESATPESGPGSEPATSGSETPGTSESATPESGPGTSTEPSEGSAPGTSESATPESGPGSPAGSPTSTEEGSPAGSPTSTEEGSPAGSPTSTEEGTSESATPESGPGTSTEPSEGSAPGTQAQLLRVGCVLGTCQVQNLSHRLWQLMGPAGRQDSAPVDPSSPHSY

SEQ ID NO: 1958 - protein, 667 aa, Artificial Sequence
  Description of Artificial Sequence: Synthetic polypeptide
YAEGTFISDYSIAMDKIHQQDFVNWLLAQKGKKNDWKHNITQGGSPAGSPTSTEEGTSESATPESGPGTSTEPSEGSAPGSPAGSPTSTEEGTSTEPSEGSAPGTSTEPSEGSAPGTSESATPESGPGSEPATSGSETPGSEPATSGSETPGSPAGSPTSTEEGTSESATPESGPGTSTEPSEGSAPGTSTEPSEGSAPGSPAGSPTSTEEGTSTEPSEGSAPGTSTEPSEGSAPGTSESATPESGPGTSTEPSEGSAPGTSESATPESGPGSEPATSGSETPGTSTEPSEGSAPGTSTEPSEGSAPGTSESATPESGPGTSESATPESGPGSPAGSPTSTEEGTSESATPESGPGSEPATSGSETPGTSESATPESGPGTSTEPSEGSAPGTSTEPSEGSAPGTSTEPSEGSAPGTSTEPSEGSAPGTSTEPSEGSAPGTSTEPSEGSAPGSPAGSPTSTEEGTSTEPSEGSAPGTSESATPESGPGSEPATSGSETPGTSESATPESGPGSEPATSGSETPGTSESATPESGPGTSTEPSEGSAPGTSESATPESGPGSPAGSPTSTEEGSPAGSPTSTEEGSPAGSPTSTEEGTSESATPESGPGTSTEPSEGSAPGTQAQLLRVGCVLGTCQVQNLSHRLWQLMGPAGRQDSAPVDPSSPHSY

SEQ ID NO: 1959 - protein, 654 aa, Artificial Sequence
  Description of Artificial Sequence: Synthetic polypeptide
HSQGTFTSDYSKYLDSRRAQDFVQWLMNTGGSPAGSPTSTEEGTSESATPESGPGTSTEPSEGSAPGSPAGSPTSTEEGTSTEPSEGSAPGTSTEPSEGSAPGTSESATPESGPGSEPATSGSETPGSEPATSGSETPGSPAGSPTSTEEGTSESATPESGPGTSTEPSEGSAPGTSTEPSEGSAPGSPAGSPTSTEEGTSTEPSEGSAPGTSTEPSEGSAPGTSESATPESGPGTSTEPSEGSAPGTSESATPESGPGSEPATSGSETPGTSTEPSEGSAPGTSTEPSEGSAPGTSESATPESGPGTSESATPESGPGSPAGSPTSTEEGTSESATPESGPGSEPATSGSETPGTSESATPESGPGTSTEPSEGSAPGTSTEPSEGSAPGTSTEPSEGSAPGTSTEPSEGSAPGTSTEPSEGSAPGTSTEPSEGSAPGSPAGSPTSTEEGTSTEPSEGSAPGTSESATPESGPGSEPATSGSETPGTSESATPESGPGSEPATSGSETPGTSESATPESGPGTSTEPSEGSAPGTSESATPESGPGSPAGSPTSTEEGSPAGSPTSTEEGSPAGSPTSTEEGTSESATPESGPGTSTEPSEGSAPGTQAQLLRVGCVLGTCQVQNLSHRLWQLMGPAGRQDSAPVDPSSPHSY

SEQ ID NO: 1960 - protein, 662 aa, Artificial Sequence
  Description of Artificial Sequence: Synthetic polypeptide
HDEFERHAEGTFTSDVSSTLEGQAALEFIAWLVKGRGGGSPAGSPTSTEEGTSESATPESGPGTSTEPSEGSAPGSPAGSPTSTEEGTSTEPSEGSAPGTSTEPSEGSAPGTSESATPESGPGSEPATSGSETPGSEPATSGSETPGSPAGSPTSTEEGTSESATPESGPGTSTEPSEGSAPGTSTEPSEGSAPGSPAGSPTSTEEGTSTEPSEGSAPGTSTEPSEGSAPGTSESATPESGPGTSTEPSEGSAPGTSESATPESGPGSEPATSGSETPGTSTEPSEGSAPGTSTEPSEGSAPGTSESATPESGPGTSESATPESGPGSPAGSPTSTEEGTSESATPESGPGSEPATSGSETPGTSESATPESGPGTSTEPSEGSAPGTSTEPSEGSAPGTSTEPSEGSAPGTSTEPSEGSAPGTSTEPSEGSAPGTSTEPSEGSAPGSPAGSPTSTEEGTSTEPSEGSAPGTSESATPESGPGSEPATSGSETPGTSESATPESGPGSEPATSGSETPGTSESATPESGPGTSTEPSEGSAPGTSESATPESGPGSPAGSPTSTEEGSPAGSPTSTEEGSPAGSPTSTEEGTSESATPESGPGTSTEPSEGSAPGTQAQLLRVGCVLGTCQVQNLSHRLWQLMGPAGRQDSAPVDPSSPHSY

SEQ ID NO: 1961 - protein, 655 aa, Artificial Sequence
  Description of Artificial Sequence: Synthetic polypeptide
HAEGTFTSDVSSYLEGQAALEFIAWLVKGRGGSPAGSPTSTEEGTSESATPESGPGTSTEPSEGSAPGSPAGSPTSTEEGTSTEPSEGSAPGTSTEPSEGSAPGTSESATPESGPGSEPATSGSETPGSEPATSGSETPGSPAGSPTSTEEGTSESATPESGPGTSTEPSEGSAPGTSTEPSEGSAPGSPAGSPTSTEEGTSTEPSEGSAPGTSTEPSEGSAPGTSESATPESGPGTSTEPSEGSAPGTSESATPESGPGSEPATSGSETPGTSTEPSEGSAPGTSTEPSEGSAPGTSESATPESGPGTSESATPESGPGSPAGSPTSTEEGTSESATPESGPGSEPATSGSETPGTSESATPESGPGTSTEPSEGSAPGTSTEPSEGSAPGTSTEPSEGSAPGTSTEPSEGSAPGTSTEPSEGSAPGTSTEPSEGSAPGSPAGSPTSTEEGTSTEPSEGSAPGTSESATPESGPGSEPATSGSETPGTSESATPESGPGSEPATSGSETPGTSESATPESGPGTSTEPSEGSAPGTSESATPESGPGSPAGSPTSTEEGSPAGSPTSTEEGSPAGSPTSTEEGTSESATPESGPGTSTEPSEGSAPGTQAQLLRVGCVLGTCQVQNLSHRLWQLMGPAGRQDSAPVDPSSPHSY

SEQ ID NO: 1962 - protein, 658 aa, Artificial Sequence
  Description of Artificial Sequence: Synthetic polypeptide
HADGSFSDEMNTILDNLAARDFINWLIETKITDGGSPAGSPTSTEEGTSESATPESGPGTSTEPSEGSAPGSPAGSPTSTEEGTSTEPSEGSAPGTSTEPSEGSAPGTSESATPESGPGSEPATSGSETPGSEPATSGSETPGSPAGSPTSTEEGTSESATPESGPGTSTEPSEGSAPGTSTEPSEGSAPGSPAGSPTSTEEGTSTEPSEGSAPGTSTEPSEGSAPGTSESATPESGPGTSTEPSEGSAPGTSESATPESGPGSEPATSGSETPGTSTEPSEGSAPGTSTEPSEGSAPGTSESATPESGPGTSESATPESGPGSPAGSPTSTEEGTSESATPESGPGSEPATSGSETPGTSESATPESGPGTSTEPSEGSAPGTSTEPSEGSAPGTSTEPSEGSAPGTSTEPSEGSAPGTSTEPSEGSAPGTSTEPSEGSAPGSPAGSPTSTEEGTSTEPSEGSAPGTSESATPESGPGSEPATSGSETPGTSESATPESGPGSEPATSGSETPGTSESATPESGPGTSTEPSEGSAPGTSESATPESGPGSPAGSPTSTEEGSPAGSPTSTEEGSPAGSPTSTEEGTSESATPESGPGTSTEPSEGSAPGTQAQLLRVGCVLGTCQVQNLSHRLWQLMGPAGRQDSAPVDPSSPHSY

SEQ ID NO: 1963 - protein, 695 aa, Artificial Sequence
  Description of Artificial Sequence: Synthetic polypeptide
GPETLCGAELVDALQFVCGDRGFYFNKPTGYGSSSRRAPQTGIVDECCFRSCDLRRLEMYCAPLKPAKSAGGSPAGSPTSTEEGTSESATPESGPGTSTEPSEGSAPGSPAGSPTSTEEGTSTEPSEGSAPGTSTEPSEGSAPGTSESATPESGPGSEPATSGSETPGSEPATSGSETPGSPAGSPTSTEEGTSESATPESGPGTSTEPSEGSAPGTSTEPSEGSAPGSPAGSPTSTEEGTSTEPSEGSAPGTSTEPSEGSAPGTSESATPESGPGTSTEPSEGSAPGTSESATPESGPGSEPATSGSETPGTSTEPSEGSAPGTSTEPSEGSAPGTSESATPESGPGTSESATPESGPGSPAGSPTSTEEGTSESATPESGPGSEPATSGSETPGTSESATPESGPGTSTEPSEGSAPGTSTEPSEGSAPGTSTEPSEGSAPGTSTEPSEGSAPGTSTEPSEGSAPGTSTEPSEGSAPGSPAGSPTSTEEGTSTEPSEGSAPGTSESATPESGPGSEPATSGSETPGTSESATPESGPGSEPATSGSETPGTSESATPESGPGTSTEPSEGSAPGTSESATPESGPGSPAGSPTSTEEGSPAGSPTSTEEGSPAGSPTSTEEGTSESATPESGPGTSTEPSEGSAPGTQAQLLRVGCVLGTCQVQNLSHRLWQLMGPAGRQDSAPVDPSSPHSY

SEQ ID NO: 1964 - protein, 692 aa, Artificial Sequence
  Description of Artificial Sequence: Synthetic polypeptide
AYRPSETLCGGELVDTLQFVCGDRGFYFSRPASRVSRRSRGIVEECCFRSCDLALLETYCATPAKSEGGSPAGSPTSTEEGTSESATPESGPGTSTEPSEGSAPGSPAGSPTSTEEGTSTEPSEGSAPGTSTEPSEGSAPGTSESATPESGPGSEPATSGSETPGSEPATSGSETPGSPAGSPTSTEEGTSESATPESGPGTSTEPSEGSAPGTSTEPSEGSAPGSPAGSPTSTEEGTSTEPSEGSAPGTSTEPSEGSAPGTSESATPESGPGTSTEPSEGSAPGTSESATPESGPGSEPATSGSETPGTSTEPSEGSAPGTSTEPSEGSAPGTSESATPESGPGTSESATPESGPGSPAGSPTSTEEGTSESATPESGPGSEPATSGSETPGTSESATPESGPGTSTEPSEGSAPGTSTEPSEGSAPGTSTEPSEGSAPGTSTEPSEGSAPGTSTEPSEGSAPGTSTEPSEGSAPGSPAGSPTSTEEGTSTEPSEGSAPGTSESATPESGPGSEPATSGSETPGTSESATPESGPGSEPATSGSETPGTSESATPESGPGTSTEPSEGSAPGTSESATPESGPGSPAGSPTSTEEGSPAGSPTSTEEGSPAGSPTSTEEGTSESATPESGPGTSTEPSEGSAPGTQAQLLRVGCVLGTCQVQNLSHRLWQLMGPAGRQDSAPVDPSSPHSY

SEQ ID NO: 1965 - protein, 774 aa, Artificial Sequence
  Description of Artificial Sequence: Synthetic polypeptide
EESQKKLPSSRITCPQGSVAYGSYCYSLILIPQTWSNAELSCQMHFSGHLAFLLSTGEITFVSSLVKNSLTAYQYIWIGLHDPSHGTLPNGSGWKWSSSNVLTFYNWERNPSIAADRGYCAVLSQKSGFQKWRDFNCENELPYICKFKVGGSPAGSPTSTEEGTSESATPESGPGTSTEPSEGSAPGSPAGSPTSTEEGTSTEPSEGSAPGTSTEPSEGSAPGTSESATPESGPGSEPATSGSETPGSEPATSGSETPGSPAGSPTSTEEGTSESATPESGPGTSTEPSEGSAPGTSTEPSEGSAPGSPAGSPTSTEEGTSTEPSEGSAPGTSTEPSEGSAPGTSESATPESGPGTSTEPSEGSAPGTSESATPESGPGSEPATSGSETPGTSTEPSEGSAPGTSTEPSEGSAPGTSESATPESGPGTSESATPESGPGSPAGSPTSTEEGTSESATPESGPGSEPATSGSETPGTSESATPESGPGTSTEPSEGSAPGTSTEPSEGSAPGTSTEPSEGSAPGTSTEPSEGSAPGTSTEPSEGSAPGTSTEPSEGSAPGSPAGSPTSTEEGTSTEPSEGSAPGTSESATPESGPGSEPATSGSETPGTSESATPESGPGSEPATSGSETPGTSESATPESGPGTSTEPSEGSAPGTSESATPESGPGSPAGSPTSTEEGSPAGSPTSTEEGSPAGSPTSTEEGTSESATPESGPGTSTEPSEGSAPGTQAQLLRVGCVLGTCQVQNLSHRLWQLMGPAGRQDSAPVDPSSPHSY

SEQ ID NO: 1966 - protein, 672 aa, Artificial Sequence
  Description of Artificial Sequence: Synthetic polypeptide
TQAQLLRVGCVLGTCQVQNLSHRLWQLMGPAGRQDSAPVDPSSPHSYGGSPAGSPTSTEEGTSESATPESGPGTSTEPSEGSAPGSPAGSPTSTEEGTSTEPSEGSAPGTSTEPSEGSAPGTSESATPESGPGSEPATSGSETPGSEPATSGSETPGSPAGSPTSTEEGTSESATPESGPGTSTEPSEGSAPGTSTEPSEGSAPGSPAGSPTSTEEGTSTEPSEGSAPGTSTEPSEGSAPGTSESATPESGPGTSTEPSEGSAPGTSESATPESGPGSEPATSGSETPGTSTEPSEGSAPGTSTEPSEGSAPGTSESATPESGPGTSESATPESGPGSPAGSPTSTEEGTSESATPESGPGSEPATSGSETPGTSESATPESGPGTSTEPSEGSAPGTSTEPSEGSAPGTSTEPSEGSAPGTSTEPSEGSAPGTSTEPSEGSAPGTSTEPSEGSAPGSPAGSPTSTEEGTSTEPSEGSAPGTSESATPESGPGSEPATSGSETPGTSESATPESGPGSEPATSGSETPGTSESATPESGPGTSTEPSEGSAPGTSESATPESGPGSPAGSPTSTEEGSPAGSPTSTEEGSPAGSPTSTEEGTSESATPESGPGTSTEPSEGSAPGTQAQLLRVGCVLGTCQVQNLSHRLWQLMGPAGRQDSAPVDPSSPHSY

SEQ ID NO: 1967 - protein, 771 aa, Artificial Sequence
  Description of Artificial Sequence: Synthetic polypeptide
VPIQKVQDDTKTLIKTIVTRINDISHTQSVSSKQKVTGLDFIPGLHPILTLSKMDQTLAVYQQILTSMPSRNVIQISNDLENLRDLLHVLAFSKSCHLPWASGLETLDSLGGVLEASGYSTEVVALSRLQGSLQDMLWQLDLSPGCGGSPAGSPTSTEEGTSESATPESGPGTSTEPSEGSAPGSPAGSPTSTEEGTSTEPSEGSAPGTSTEPSEGSAPGTSESATPESGPGSEPATSGSETPGSEPATSGSETPGSPAGSPTSTEEGTSESATPESGPGTSTEPSEGSAPGTSTEPSEGSAPGSPAGSPTSTEEGTSTEPSEGSAPGTSTEPSEGSAPGTSESATPESGPGTSTEPSEGSAPGTSESATPESGPGSEPATSGSETPGTSTEPSEGSAPGTSTEPSEGSAPGTSESATPESGPGTSESATPESGPGSPAGSPTSTEEGTSESATPESGPGSEPATSGSETPGTSESATPESGPGTSTEPSEGSAPGTSTEPSEGSAPGTSTEPSEGSAPGTSTEPSEGSAPGTSTEPSEGSAPGTSTEPSEGSAPGSPAGSPTSTEEGTSTEPSEGSAPGTSESATPESGPGSEPATSGSETPGTSESATPESGPGSEPATSGSETPGTSESATPESGPGTSTEPSEGSAPGTSESATPESGPGSPAGSPTSTEEGSPAGSPTSTEEGSPAGSPTSTEEGTSESATPESGPGTSTEPSEGSAPGTQAQLLRVGCVLGTCQVQNLSHRLWQLMGPAGRQDSAPVDPSSPHSY

SEQ ID NO: 1968 - protein, 640 aa, Artificial Sequence; identical to SEQ ID NO: 1777
  Description of Artificial Sequence: Synthetic polypeptide

SEQ ID NO: 1969 - protein, 652 aa, Artificial Sequence; identical to SEQ ID NO: 1778
  Description of Artificial Sequence: Synthetic polypeptide

SEQ ID NO: 1970 - protein, 652 aa, Artificial Sequence; identical to SEQ ID NO: 1779
  Description of Artificial Sequence: Synthetic polypeptide

SEQ ID NO: 1971 - protein, 940 aa, Artificial Sequence
  Description of Artificial Sequence: Synthetic polypeptide
KCNTATCATNRLANFLVHSSNNFGPILPPTNVGSNTYGGSPAGSPTSTEEGTSESATPESGPGTSTEPSEGSAPGSPAGSPTSTEEGTSTEPSEGSAPGTSTEPSEGSAPGTSESATPESGPGSEPATSGSETPGSEPATSGSETPGSPAGSPTSTEEGTSESATPESGPGTSTEPSEGSAPGTSTEPSEGSAPGSPAGSPTSTEEGTSTEPSEGSAPGTSTEPSEGSAPGTSESATPESGPGTSTEPSEGSAPGTSESATPESGPGSEPATSGSETPGTSTEPSEGSAPGTSTEPSEGSAPGTSESATPESGPGTSESATPESGPGSPAGSPTSTEEGTSESATPESGPGSEPATSGSETPGTSESATPESGPGTSTEPSEGSAPGTSTEPSEGSAPGTSTEPSEGSAPGTSTEPSEGSAPGTSTEPSEGSAPGTSTEPSEGSAPGSPAGSPTSTEEGTSTEPSEGSAPGTSESATPESGPGSEPATSGSETPGTSESATPESGPGSEPATSGSETPGTSESATPESGPGTSTEPSEGSAPGTSESATPESGPGSPAGSPTSTEEGSPAGSPTSTEEGSPAGSPTSTEEGTSESATPESGPGTSTEPSEGSAPGTSESATPESGPGSEPATSGSETPGTSESATPESGPGSEPATSGSETPGTSESATPESGPGTSTEPSEGSAPGSPAGSPTSTEEGTSESATPESGPGSEPATSGSETPGTSESATPESGPGSPAGSPTSTEEGSPAGSPTSTEEGTSTEPSEGSAPGTSESATPESGPGTSESATPESGPGTSESATPESGPGSEPATSGSETPGSEPATSGSETPGSPAGSPTSTEEGTSTEPSEGSAPGTSTEPSEGSAPGSEPATSGSETPGTSESATPESGPGTSTEPSEGSAPGKCNTATCATQRLANFLVHSSNNFGAILSSTNVGSNTY

SEQ ID NO: 1972 - protein, 651 aa, Artificial Sequence
  Description of Artificial Sequence: Synthetic polypeptide
YPIKPEAPGEDASPEELNRYYASLRHYLNLVTRQRYGGSPAGSPTSTEEGTSESATPESGPGTSTEPSEGSAPGSPAGSPTSTEEGTSTEPSEGSAPGTSTEPSEGSAPGTSESATPESGPGSEPATSGSETPGSEPATSGSETPGSPAGSPTSTEEGTSESATPESGPGTSTEPSEGSAPGTSTEPSEGSAPGSPAGSPTSTEEGTSTEPSEGSAPGTSTEPSEGSAPGTSESATPESGPGTSTEPSEGSAPGTSESATPESGPGSEPATSGSETPGTSTEPSEGSAPGTSTEPSEGSAPGTSESATPESGPGTSESATPESGPGSPAGSPTSTEEGTSESATPESGPGSEPATSGSETPGTSESATPESGPGTSTEPSEGSAPGTSTEPSEGSAPGTSTEPSEGSAPGTSTEPSEGSAPGTSTEPSEGSAPGTSTEPSEGSAPGSPAGSPTSTEEGTSTEPSEGSAPGTSESATPESGPGSEPATSGSETPGTSESATPESGPGSEPATSGSETPGTSESATPESGPGTSTEPSEGSAPGTSESATPESGPGSPAGSPTSTEEGSPAGSPTSTEEGSPAGSPTSTEEGTSESATPESGPGTSTEPSEGSAPGKCNTATCATQRLANFLVHSSNNFGAILSSTNVGSNTY

SEQ ID NO: 1973 - protein, 656 aa, Artificial Sequence
  Description of Artificial Sequence: Synthetic polypeptide
IVLSLDVPIGLLQILLEQARARAAREQATTNARILARVGHCGGSPAGSPTSTEEGTSESATPESGPGTSTEPSEGSAPGSPAGSPTSTEEGTSTEPSEGSAPGTSTEPSEGSAPGTSESATPESGPGSEPATSGSETPGSEPATSGSETPGSPAGSPTSTEEGTSESATPESGPGTSTEPSEGSAPGTSTEPSEGSAPGSPAGSPTSTEEGTSTEPSEGSAPGTSTEPSEGSAPGTSESATPESGPGTSTEPSEGSAPGTSESATPESGPGSEPATSGSETPGTSTEPSEGSAPGTSTEPSEGSAPGTSESATPESGPGTSESATPESGPGSPAGSPTSTEEGTSESATPESGPGSEPATSGSETPGTSESATPESGPGTSTEPSEGSAPGTSTEPSEGSAPGTSTEPSEGSAPGTSTEPSEGSAPGTSTEPSEGSAPGTSTEPSEGSAPGSPAGSPTSTEEGTSTEPSEGSAPGTSESATPESGPGSEPATSGSETPGTSESATPESGPGSEPATSGSETPGTSESATPESGPGTSTEPSEGSAPGTSESATPESGPGSPAGSPTSTEEGSPAGSPTSTEEGSPAGSPTSTEEGTSESATPESGPGTSTEPSEGSAPGKCNTATCATQRLANFLVHSSNNFGAILSSTNVGSNTY

SEQ ID NO: 1974 - protein, 653 aa, Artificial Sequence
  Description of Artificial Sequence: Synthetic polypeptide
FTLSLDVPTNIMNLLFNIAKAKNLRAQAAANAHLMAQIGGSPAGSPTSTEEGTSESATPESGPGTSTEPSEGSAPGSPAGSPTSTEEGTSTEPSEGSAPGTSTEPSEGSAPGTSESATPESGPGSEPATSGSETPGSEPATSGSETPGSPAGSPTSTEEGTSESATPESGPGTSTEPSEGSAPGTSTEPSEGSAPGSPAGSPTSTEEGTSTEPSEGSAPGTSTEPSEGSAPGTSESATPESGPGTSTEPSEGSAPGTSESATPESGPGSEPATSGSETPGTSTEPSEGSAPGTSTEPSEGSAPGTSESATPESGPGTSESATPESGPGSPAGSPTSTEEGTSESATPESGPGSEPATSGSETPGTSESATPESGPGTSTEPSEGSAPGTSTEPSEGSAPGTSTEPSEGSAPGTSTEPSEGSAPGTSTEPSEGSAPGTSTEPSEGSAPGSPAGSPTSTEEGTSTEPSEGSAPGTSESATPESGPGSEPATSGSETPGTSESATPESGPGSEPATSGSETPGTSESATPESGPGTSTEPSEGSAPGTSESATPESGPGSPAGSPTSTEEGSPAGSPTSTEEGSPAGSPTSTEEGTSESATPESGPGTSTEPSEGSAPGKCNTATCATQRLANFLVHSSNNFGAILSSTNVGSNTY

SEQ ID NO: 1975 - protein, 642 aa, Artificial Sequence
  Description of Artificial Sequence: Synthetic polypeptide
DPSKKQGPWLEEEEEAYGWMDFGGSPAGSPTSTEEGTSESATPESGPGTSTEPSEGSAPGSPAGSPTSTEEGTSTEPSEGSAPGTSTEPSEGSAPGTSESATPESGPGSEPATSGSETPGSEPATSGSETPGSPAGSPTSTEEGTSESATPESGPGTSTEPSEGSAPGTSTEPSEGSAPGSPAGSPTSTEEGTSTEPSEGSAPGTSTEPSEGSAPGTSESATPESGPGTSTEPSEGSAPGTSESATPESGPGSEPATSGSETPGTSTEPSEGSAPGTSTEPSEGSAPGTSESATPESGPGTSESATPESGPGSPAGSPTSTEEGTSESATPESGPGSEPATSGSETPGTSESATPESGPGTSTEPSEGSAPGTSTEPSEGSAPGTSTEPSEGSAPGTSTEPSEGSAPGTSTEPSEGSAPGTSTEPSEGSAPGSPAGSPTSTEEGTSTEPSEGSAPGTSESATPESGPGSEPATSGSETPGTSESATPESGPGSEPATSGSETPGTSESATPESGPGTSTEPSEGSAPGTSESATPESGPGSPAGSPTSTEEGSPAGSPTSTEEGSPAGSPTSTEEGTSESATPESGPGTSTEPSEGSAPGYAEGTFISDYSIAMDKIHQQDFVNWLLAQKGKKNDWKHNITQ

SEQ ID NO: 1976 - protein, 629 aa, Artificial Sequence
  Description of Artificial Sequence: Synthetic polypeptide
DPSKKQGPWLEEEEEAYGWMDFGGSPAGSPTSTEEGTSESATPESGPGTSTEPSEGSAPGSPAGSPTSTEEGTSTEPSEGSAPGTSTEPSEGSAPGTSESATPESGPGSEPATSGSETPGSEPATSGSETPGSPAGSPTSTEEGTSESATPESGPGTSTEPSEGSAPGTSTEPSEGSAPGSPAGSPTSTEEGTSTEPSEGSAPGTSTEPSEGSAPGTSESATPESGPGTSTEPSEGSAPGTSESATPESGPGSEPATSGSETPGTSTEPSEGSAPGTSTEPSEGSAPGTSESATPESGPGTSESATPESGPGSPAGSPTSTEEGTSESATPESGPGSEPATSGSETPGTSESATPESGPGTSTEPSEGSAPGTSTEPSEGSAPGTSTEPSEGSAPGTSTEPSEGSAPGTSTEPSEGSAPGTSTEPSEGSAPGSPAGSPTSTEEGTSTEPSEGSAPGTSESATPESGPGSEPATSGSETPGTSESATPESGPGSEPATSGSETPGTSESATPESGPGTSTEPSEGSAPGTSESATPESGPGSPAGSPTSTEEGSPAGSPTSTEEGSPAGSPTSTEEGTSESATPESGPGTSTEPSEGSAPGHSQGTFTSDYSKYLDSRRAQDFVQWLMNT

SEQ ID NO: 1977 - protein, 637 aa, Artificial Sequence
  Description of Artificial Sequence: Synthetic polypeptide
DPSKKQGPWLEEEEEAYGWMDFGGSPAGSPTSTEEGTSESATPESGPGTSTEPSEGSAPGSPAGSPTSTEEGTSTEPSEGSAPGTSTEPSEGSAPGTSESATPESGPGSEPATSGSETPGSEPATSGSETPGSPAGSPTSTEEGTSESATPESGPGTSTEPSEGSAPGTSTEPSEGSAPGSPAGSPTSTEEGTSTEPSEGSAPGTSTEPSEGSAPGTSESATPESGPGTSTEPSEGSAPGTSESATPESGPGSEPATSGSETPGTSTEPSEGSAPGTSTEPSEGSAPGTSESATPESGPGTSESATPESGPGSPAGSPTSTEEGTSESATPESGPGSEPATSGSETPGTSESATPESGPGTSTEPSEGSAPGTSTEPSEGSAPGTSTEPSEGSAPGTSTEPSEGSAPGTSTEPSEGSAPGTSTEPSEGSAPGSPAGSPTSTEEGTSTEPSEGSAPGTSESATPESGPGSEPATSGSETPGTSESATPESGPGSEPATSGSETPGTSESATPESGPGTSTEPSEGSAPGTSESATPESGPGSPAGSPTSTEEGSPAGSPTSTEEGSPAGSPTSTEEGTSESATPESGPGTSTEPSEGSAPGHDEFERHAEGTFTSDVSSTLEGQAALEFIAWLVKGRG

SEQ ID NO: 1978 - protein, 630 aa, Artificial Sequence
  Description of Artificial Sequence: Synthetic polypeptide
DPSKKQGPWLEEEEEAYGWMDFGGSPAGSPTSTEEGTSESATPESGPGTSTEPSEGSAPGSPAGSPTSTEEGTSTEPSEGSAPGTSTEPSEGSAPGTSESATPESGPGSEPATSGSETPGSEPATSGSETPGSPAGSPTSTEEGTSESATPESGPGTSTEPSEGSAPGTSTEPSEGSAPGSPAGSPTSTEEGTSTEPSEGSAPGTSTEPSEGSAPGTSESATPESGPGTSTEPSEGSAPGTSESATPESGPGSEPATSGSETPGTSTEPSEGSAPGTSTEPSEGSAPGTSESATPESGPGTSESATPESGPGSPAGSPTSTEEGTSESATPESGPGSEPATSGSETPGTSESATPESGPGTSTEPSEGSAPGTSTEPSEGSAPGTSTEPSEGSAPGTSTEPSEGSAPGTSTEPSEGSAPGTSTEPSEGSAPGSPAGSPTSTEEGTSTEPSEGSAPGTSESATPESGPGSEPATSGSETPGTSESATPESGPGSEPATSGSETPGTSESATPESGPGTSTEPSEGSAPGTSESATPESGPGSPAGSPTSTEEGSPAGSPTSTEEGSPAGSPTSTEEGTSESATPESGPGTSTEPSEGSAPGHAEGTFTSDVSSYLEGQAALEFIAWLVKGR

SEQ ID NO: 1979 - protein, 633 aa, Artificial Sequence
  Description of Artificial Sequence: Synthetic polypeptide
DPSKKQGPWLEEEEEAYGWMDFGGSPAGSPTSTEEGTSESATPESGPGTSTEPSEGSAPGSPAGSPTSTEEGTSTEPSEGSAPGTSTEPSEGSAPGTSESATPESGPGSEPATSGSETPGSEPATSGSETPGSPAGSPTSTEEGTSESATPESGPGTSTEPSEGSAPGTSTEPSEGSAPGSPAGSPTSTEEGTSTEPSEGSAPGTSTEPSEGSAPGTSESATPESGPGTSTEPSEGSAPGTSESATPESGPGSEPATSGSETPGTSTEPSEGSAPGTSTEPSEGSAPGTSESATPESGPGTSESATPESGPGSPAGSPTSTEEGTSESATPESGPGSEPATSGSETPGTSESATPESGPGTSTEPSEGSAPGTSTEPSEGSAPGTSTEPSEGSAPGTSTEPSEGSAPGTSTEPSEGSAPGTSTEPSEGSAPGSPAGSPTSTEEGTSTEPSEGSAPGTSESATPESGPGSEPATSGSETPGTSESATPESGPGSEPATSGSETPGTSESATPESGPGTSTEPSEGSAPGTSESATPESGPGSPAGSPTSTEEGSPAGSPTSTEEGSPAGSPTSTEEGTSESATPESGPGTSTEPSEGSAPGHADGSFSDEMNTILDNLAARDFINWLIETKITD

SEQ ID NO: 1980 - protein, 670 aa, Artificial Sequence
  Description of Artificial Sequence: Synthetic polypeptide
DPSKKQGPWLEEEEEAYGWMDFGGSPAGSPTSTEEGTSESATPESGPGTSTEPSEGSAPGSPAGSPTSTEEGTSTEPSEGSAPGTSTEPSEGSAPGTSESATPESGPGSEPATSGSETPGSEPATSGSETPGSPAGSPTSTEEGTSESATPESGPGTSTEPSEGSAPGTSTEPSEGSAPGSPAGSPTSTEEGTSTEPSEGSAPGTSTEPSEGSAPGTSESATPESGPGTSTEPSEGSAPGTSESATPESGPGSEPATSGSETPGTSTEPSEGSAPGTSTEPSEGSAPGTSESATPESGPGTSESATPESGPGSPAGSPTSTEEGTSESATPESGPGSEPATSGSETPGTSESATPESGPGTSTEPSEGSAPGTSTEPSEGSAPGTSTEPSEGSAPGTSTEPSEGSAPGTSTEPSEGSAPGTSTEPSEGSAPGSPAGSPTSTEEGTSTEPSEGSAPGTSESATPESGPGSEPATSGSETPGTSESATPESGPGSEPATSGSETPGTSESATPESGPGTSTEPSEGSAPGTSESATPESGPGSPAGSPTSTEEGSPAGSPTSTEEGSPAGSPTSTEEGTSESATPESGPGTSTEPSEGSAPGGPETLCGAELVDALQFVCGDRGFYFNKPTGYGSSSRRAPQTGIVDECCFRSCDLRRLEMYCAPLKPAKSA

SEQ ID NO: 1981 - protein, 667 aa, Artificial Sequence
  Description of Artificial Sequence: Synthetic polypeptide
DPSKKQGPWLEEEEEAYGWMDFGGSPAGSPTSTEEGTSESATPESGPGTSTEPSEGSAPGSPAGSPTSTEEGTSTEPSEGSAPGTSTEPSEGSAPGTSESATPESGPGSEPATSGSETPGSEPATSGSETPGSPAGSPTSTEEGTSESATPESGPGTSTEPSEGSAPGTSTEPSEGSAPGSPAGSPTSTEEGTSTEPSEGSAPGTSTEPSEGSAPGTSESATPESGPGTSTEPSEGSAPGTSESATPESGPGSEPATSGSETPGTSTEPSEGSAPGTSTEPSEGSAPGTSESATPESGPGTSESATPESGPGSPAGSPTSTEEGTSESATPESGPGSEPATSGSETPGTSESATPESGPGTSTEPSEGSAPGTSTEPSEGSAPGTSTEPSEGSAPGTSTEPSEGSAPGTSTEPSEGSAPGTSTEPSEGSAPGSPAGSPTSTEEGTSTEPSEGSAPGTSESATPESGPGSEPATSGSETPGTSESATPESGPGSEPATSGSETPGTSESATPESGPGTSTEPSEGSAPGTSESATPESGPGSPAGSPTSTEEGSPAGSPTSTEEGSPAGSPTSTEEGTSESATPESGPGTSTEPSEGSAPGAYRPSETLCGGELVDTLQFVCGDRGFYFSRPASRVSRRSRGIVEECCFRSCDLALLETYCATPAKSE

SEQ ID NO: 1982 - protein, 749 aa, Artificial Sequence
  Description of Artificial Sequence: Synthetic polypeptide
DPSKKQGPWLEEEEEAYGWMDFGGSPAGSPTSTEEGTSESATPESGPGTSTEPSEGSAPGSPAGSPTSTEEGTSTEPSEGSAPGTSTEPSEGSAPGTSESATPESGPGSEPATSGSETPGSEPATSGSETPGSPAGSPTSTEEGTSESATPESGPGTSTEPSEGSAPGTSTEPSEGSAPGSPAGSPTSTEEGTSTEPSEGSAPGTSTEPSEGSAPGTSESATPESGPGTSTEPSEGSAPGTSESATPESGPGSEPATSGSETPGTSTEPSEGSAPGTSTEPSEGSAPGTSESATPESGPGTSESATPESGPGSPAGSPTSTEEGTSESATPESGPGSEPATSGSETPGTSESATPESGPGTSTEPSEGSAPGTSTEPSEGSAPGTSTEPSEGSAPGTSTEPSEGSAPGTSTEPSEGSAPGTSTEPSEGSAPGSPAGSPTSTEEGTSTEPSEGSAPGTSESATPESGPGSEPATSGSETPGTSESATPESGPGSEPATSGSETPGTSESATPESGPGTSTEPSEGSAPGTSESATPESGPGSPAGSPTSTEEGSPAGSPTSTEEGSPAGSPTSTEEGTSESATPESGPGTSTEPSEGSAPGEESQKKLPSSRITCPQGSVAYGSYCYSLILIPQTWSNAELSCQMHFSGHLAFLLSTGEITFVSSLVKNSLTAYQYIWIGLHDPSHGTLPNGSGWKWSSSNVLTFYNWERNPSIAADRGYCAVLSQKSGFQKWRDFNCENELPYICKFKV

SEQ ID NO: 1983 - protein, 647 aa, Artificial Sequence; identical to SEQ ID NO: 1957
  Description of Artificial Sequence: Synthetic polypeptide

SEQ ID NO: 1984 - protein, 746 aa, Artificial Sequence
  Description of Artificial Sequence: Synthetic polypeptide
DPSKKQGPWLEEEEEAYGWMDFGGSPAGSPTSTEEGTSESATPESGPGTSTEPSEGSAPGSPAGSPTSTEEGTSTEPSEGSAPGTSTEPSEGSAPGTSESATPESGPGSEPATSGSETPGSEPATSGSETPGSPAGSPTSTEEGTSESATPESGPGTSTEPSEGSAPGTSTEPSEGSAPGSPAGSPTSTEEGTSTEPSEGSAPGTSTEPSEGSAPGTSESATPESGPGTSTEPSEGSAPGTSESATPESGPGSEPATSGSETPGTSTEPSEGSAPGTSTEPSEGSAPGTSESATPESGPGTSESATPESGPGSPAGSPTSTEEGTSESATPESGPGSEPATSGSETPGTSESATPESGPGTSTEPSEGSAPGTSTEPSEGSAPGTSTEPSEGSAPGTSTEPSEGSAPGTSTEPSEGSAPGTSTEPSEGSAPGSPAGSPTSTEEGTSTEPSEGSAPGTSESATPESGPGSEPATSGSETPGTSESATPESGPGSEPATSGSETPGTSESATPESGPGTSTEPSEGSAPGTSESATPESGPGSPAGSPTSTEEGSPAGSPTSTEEGSPAGSPTSTEEGTSESATPESGPGTSTEPSEGSAPGVPIQKVQDDTKTLIKTIVTRINDISHTQSVSSKQKVTGLDFIPGLHPILTLSKMDQTLAVYQQILTSMPSRNVIQISNDLENLRDLLHVLAFSKSCHLPWASGLETLDSLGGVLEASGYSTEVVALSRLQGSLQDMLWQLDLSPGC

SEQ ID NO: 1985 - protein, 625 aa, Artificial Sequence
  Description of Artificial Sequence: Synthetic polypeptide
DPSKKQGPWLEEEEEAYGWMDFGGSPAGSPTSTEEGTSESATPESGPGTSTEPSEGSAPGSPAGSPTSTEEGTSTEPSEGSAPGTSTEPSEGSAPGTSESATPESGPGSEPATSGSETPGSEPATSGSETPGSPAGSPTSTEEGTSESATPESGPGTSTEPSEGSAPGTSTEPSEGSAPGSPAGSPTSTEEGTSTEPSEGSAPGTSTEPSEGSAPGTSESATPESGPGTSTEPSEGSAPGTSESATPESGPGSEPATSGSETPGTSTEPSEGSAPGTSTEPSEGSAPGTSESATPESGPGTSESATPESGPGSPAGSPTSTEEGTSESATPESGPGSEPATSGSETPGTSESATPESGPGTSTEPSEGSAPGTSTEPSEGSAPGTSTEPSEGSAPGTSTEPSEGSAPGTSTEPSEGSAPGTSTEPSEGSAPGSPAGSPTSTEEGTSTEPSEGSAPGTSESATPESGPGSEPATSGSETPGTSESATPESGPGSEPATSGSETPGTSESATPESGPGTSTEPSEGSAPGTSESATPESGPGSPAGSPTSTEEGSPAGSPTSTEEGSPAGSPTSTEEGTSESATPESGPGTSTEPSEGSAPGFRVDEEFQSPFASQSRGYFLFRPRN

SEQ ID NO: 1986 - protein, 637 aa, Artificial Sequence
  Description of Artificial Sequence: Synthetic polypeptide
DPSKKQGPWLEEEEEAYGWMDFGGSPAGSPTSTEEGTSESATPESGPGTSTEPSEGSAPGSPAGSPTSTEEGTSTEPSEGSAPGTSTEPSEGSAPGTSESATPESGPGSEPATSGSETPGSEPATSGSETPGSPAGSPTSTEEGTSESATPESGPGTSTEPSEGSAPGTSTEPSEGSAPGSPAGSPTSTEEGTSTEPSEGSAPGTSTEPSEGSAPGTSESATPESGPGTSTEPSEGSAPGTSESATPESGPGSEPATSGSETPGTSTEPSEGSAPGTSTEPSEGSAPGTSESATPESGPGTSESATPESGPGSPAGSPTSTEEGTSESATPESGPGSEPATSGSETPGTSESATPESGPGTSTEPSEGSAPGTSTEPSEGSAPGTSTEPSEGSAPGTSTEPSEGSAPGTSTEPSEGSAPGTSTEPSEGSAPGSPAGSPTSTEEGTSTEPSEGSAPGTSESATPESGPGSEPATSGSETPGTSESATPESGPGSEPATSGSETPGTSESATPESGPGTSTEPSEGSAPGTSESATPESGPGSPAGSPTSTEEGSPAGSPTSTEEGSPAGSPTSTEEGTSESATPESGPGTSTEPSEGSAPGHSQGTFTSDYSKYLDSRRAQDFVQWLMNTKRNRNNIA

SEQ ID NO: 1987 - protein, 637 aa, Artificial Sequence; identical to SEQ ID NO: 1766
  Description of Artificial Sequence: Synthetic polypeptide

SEQ ID NO: 1988 - protein, 636 aa, Artificial Sequence
  Description of Artificial Sequence: Synthetic polypeptide
DPSKKQGPWLEEEEEAYGWMDFGGSPAGSPTSTEEGTSESATPESGPGTSTEPSEGSAPGSPAGSPTSTEEGTSTEPSEGSAPGTSTEPSEGSAPGTSESATPESGPGSEPATSGSETPGSEPATSGSETPGSPAGSPTSTEEGTSESATPESGPGTSTEPSEGSAPGTSTEPSEGSAPGSPAGSPTSTEEGTSTEPSEGSAPGTSTEPSEGSAPGTSESATPESGPGTSTEPSEGSAPGTSESATPESGPGSEPATSGSETPGTSTEPSEGSAPGTSTEPSEGSAPGTSESATPESGPGTSESATPESGPGSPAGSPTSTEEGTSESATPESGPGSEPATSGSETPGTSESATPESGPGTSTEPSEGSAPGTSTEPSEGSAPGTSTEPSEGSAPGTSTEPSEGSAPGTSTEPSEGSAPGTSTEPSEGSAPGSPAGSPTSTEEGTSTEPSEGSAPGTSESATPESGPGSEPATSGSETPGTSESATPESGPGSEPATSGSETPGTSESATPESGPGTSTEPSEGSAPGTSESATPESGPGSPAGSPTSTEEGSPAGSPTSTEEGSPAGSPTSTEEGTSESATPESGPGTSTEPSEGSAPGYPIKPEAPGEDASPEELNRYYASLRHYLNLVTRQRY

SEQ ID NO: 1989 - protein, 641 aa, Artificial Sequence
  Description of Artificial Sequence: Synthetic polypeptide
DPSKKQGPWLEEEEEAYGWMDFGGSPAGSPTSTEEGTSESATPESGPGTSTEPSEGSAPGSPAGSPTSTEEGTSTEPSEGSAPGTSTEPSEGSAPGTSESATPESGPGSEPATSGSETPGSEPATSGSETPGSPAGSPTSTEEGTSESATPESGPGTSTEPSEGSAPGTSTEPSEGSAPGSPAGSPTSTEEGTSTEPSEGSAPGTSTEPSEGSAPGTSESATPESGPGTSTEPSEGSAPGTSESATPESGPGSEPATSGSETPGTSTEPSEGSAPGTSTEPSEGSAPGTSESATPESGPGTSESATPESGPGSPAGSPTSTEEGTSESATPESGPGSEPATSGSETPGTSESATPESGPGTSTEPSEGSAPGTSTEPSEGSAPGTSTEPSEGSAPGTSTEPSEGSAPGTSTEPSEGSAPGTSTEPSEGSAPGSPAGSPTSTEEGTSTEPSEGSAPGTSESATPESGPGSEPATSGSETPGTSESATPESGPGSEPATSGSETPGTSESATPESGPGTSTEPSEGSAPGTSESATPESGPGSPAGSPTSTEEGSPAGSPTSTEEGSPAGSPTSTEEGTSESATPESGPGTSTEPSEGSAPGIVLSLDVPIGLLQILLEQARARAAREQATTNARILARVGHC

SEQ ID NO: 1990 - protein, 638 aa, Artificial Sequence
  Description of Artificial Sequence: Synthetic polypeptide
DPSKKQGPWLEEEEEAYGWMDFGGSPAGSPTSTEEGTSESATPESGPGTSTEPSEGSAPGSPAGSPTSTEEGTSTEPSEGSAPGTSTEPSEGSAPGTSESATPESGPGSEPATSGSETPGSEPATSGSETPGSPAGSPTSTEEGTSESATPESGPGTSTEPSEGSAPGTSTEPSEGSAPGSPAGSPTSTEEGTSTEPSEGSAPGTSTEPSEGSAPGTSESATPESGPGTSTEPSEGSAPGTSESATPESGPGSEPATSGSETPGTSTEPSEGSAPGTSTEPSEGSAPGTSESATPESGPGTSESATPESGPGSPAGSPTSTEEGTSESATPESGPGSEPATSGSETPGTSESATPESGPGTSTEPSEGSAPGTSTEPSEGSAPGTSTEPSEGSAPGTSTEPSEGSAPGTSTEPSEGSAPGTSTEPSEGSAPGSPAGSPTSTEEGTSTEPSEGSAPGTSESATPESGPGSEPATSGSETPGTSESATPESGPGSEPATSGSETPGTSESATPESGPGTSTEPSEGSAPGTSESATPESGPGSPAGSPTSTEEGSPAGSPTSTEEGSPAGSPTSTEEGTSESATPESGPGTSTEPSEGSAPGFTLSLDVPTNIMNLLFNIAKAKNLRAQAAANAHLMAQI

SEQ ID NO: 1991 - protein, 642 aa, Artificial Sequence
  Description of Artificial Sequence: Synthetic polypeptide
YAEGTFISDYSIAMDKIHQQDFVNWLLAQKGKKNDWKHNITQGGSPAGSPTSTEEGTSESATPESGPGTSTEPSEGSAPGSPAGSPTSTEEGTSTEPSEGSAPGTSTEPSEGSAPGTSESATPESGPGSEPATSGSETPGSEPATSGSETPGSPAGSPTSTEEGTSESATPESGPGTSTEPSEGSAPGTSTEPSEGSAPGSPAGSPTSTEEGTSTEPSEGSAPGTSTEPSEGSAPGTSESATPESGPGTSTEPSEGSAPGTSESATPESGPGSEPATSGSETPGTSTEPSEGSAPGTSTEPSEGSAPGTSESATPESGPGTSESATPESGPGSPAGSPTSTEEGTSESATPESGPGSEPATSGSETPGTSESATPESGPGTSTEPSEGSAPGTSTEPSEGSAPGTSTEPSEGSAPGTSTEPSEGSAPGTSTEPSEGSAPGTSTEPSEGSAPGSPAGSPTSTEEGTSTEPSEGSAPGTSESATPESGPGSEPATSGSETPGTSESATPESGPGSEPATSGSETPGTSESATPESGPGTSTEPSEGSAPGTSESATPESGPGSPAGSPTSTEEGSPAGSPTSTEEGSPAGSPTSTEEGTSESATPESGPGTSTEPSEGSAPGDPSKKQGPWLEEEEEAYGWMDF

SEQ ID NO: 1992 - protein, 629 aa, Artificial Sequence
  Description of Artificial Sequence: Synthetic polypeptide
HSQGTFTSDYSKYLDSRRAQDFVQWLMNTGGSPAGSPTSTEEGTSESATPESGPGTSTEPSEGSAPGSPAGSPTSTEEGTSTEPSEGSAPGTSTEPSEGSAPGTSESATPESGPGSEPATSGSETPGSEPATSGSETPGSPAGSPTSTEEGTSESATPESGPGTSTEPSEGSAPGTSTEPSEGSAPGSPAGSPTSTEEGTSTEPSEGSAPGTSTEPSEGSAPGTSESATPESGPGTSTEPSEGSAPGTSESATPESGPGSEPATSGSETPGTSTEPSEGSAPGTSTEPSEGSAPGTSESATPESGPGTSESATPESGPGSPAGSPTSTEEGTSESATPESGPGSEPATSGSETPGTSESATPESGPGTSTEPSEGSAPGTSTEPSEGSAPGTSTEPSEGSAPGTSTEPSEGSAPGTSTEPSEGSAPGTSTEPSEGSAPGSPAGSPTSTEEGTSTEPSEGSAPGTSESATPESGPGSEPATSGSETPGTSESATPESGPGSEPATSGSETPGTSESATPESGPGTSTEPSEGSAPGTSESATPESGPGSPAGSPTSTEEGSPAGSPTSTEEGSPAGSPTSTEEGTSESATPESGPGTSTEPSEGSAPGDPSKKQGPWLEEEEEAYGWMDF

SEQ ID NO: 1993 - protein, 637 aa, Artificial Sequence
  Description of Artificial Sequence: Synthetic polypeptide
HDEFERHAEGTFTSDVSSTLEGQAALEFIAWLVKGRGGGSPAGSPTSTEEGTSESATPESGPGTSTEPSEGSAPGSPAGSPTSTEEGTSTEPSEGSAPGTSTEPSEGSAPGTSESATPESGPGSEPATSGSETPGSEPATSGSETPGSPAGSPTSTEEGTSESATPESGPGTSTEPSEGSAPGTSTEPSEGSAPGSPAGSPTSTEEGTSTEPSEGSAPGTSTEPSEGSAPGTSESATPESGPGTSTEPSEGSAPGTSESATPESGPGSEPATSGSETPGTSTEPSEGSAPGTSTEPSEGSAPGTSESATPESGPGTSESATPESGPGSPAGSPTSTEEGTSESATPESGPGSEPATSGSETPGTSESATPESGPGTSTEPSEGSAPGTSTEPSEGSAPGTSTEPSEGSAPGTSTEPSEGSAPGTSTEPSEGSAPGTSTEPSEGSAPGSPAGSPTSTEEGTSTEPSEGSAPGTSESATPESGPGSEPATSGSETPGTSESATPESGPGSEPATSGSETPGTSESATPESGPGTSTEPSEGSAPGTSESATPESGPGSPAGSPTSTEEGSPAGSPTSTEEGSPAGSPTSTEEGTSESATPESGPGTSTEPSEGSAPGDPSKKQGPWLEEEEEAYGWMDF

SEQ ID NO: 1994 - protein, 630 aa, Artificial Sequence
  Description of Artificial Sequence: Synthetic polypeptide
HAEGTFTSDVSSYLEGQAALEFIAWLVKGRGGSPAGSPTSTEEGTSESATPESGPGTSTEPSEGSAPGSPAGSPTSTEEGTSTEPSEGSAPGTSTEPSEGSAPGTSESATPESGPGSEPATSGSETPGSEPATSGSETPGSPAGSPTSTEEGTSESATPESGPGTSTEPSEGSAPGTSTEPSEGSAPGSPAGSPTSTEEGTSTEPSEGSAPGTSTEPSEGSAPGTSESATPESGPGTSTEPSEGSAPGTSESATPESGPGSEPATSGSETPGTSTEPSEGSAPGTSTEPSEGSAPGTSESATPESGPGTSESATPESGPGSPAGSPTSTEEGTSESATPESGPGSEPATSGSETPGTSESATPESGPGTSTEPSEGSAPGTSTEPSEGSAPGTSTEPSEGSAPGTSTEPSEGSAPGTSTEPSEGSAPGTSTEPSEGSAPGSPAGSPTSTEEGTSTEPSEGSAPGTSESATPESGPGSEPATSGSETPGTSESATPESGPGSEPATSGSETPGTSESATPESGPGTSTEPSEGSAPGTSESATPESGPGSPAGSPTSTEEGSPAGSPTSTEEGSPAGSPTSTEEGTSESATPESGPGTSTEPSEGSAPGDPSKKQGPWLEEEEEAYGWMDF

SEQ ID NO: 1995 - protein, 633 aa, Artificial Sequence
  Description of Artificial Sequence: Synthetic polypeptide
HADGSFSDEMNTILDNLAARDFINWLIETKITDGGSPAGSPTSTEEGTSESATPESGPGTSTEPSEGSAPGSPAGSPTSTEEGTSTEPSEGSAPGTSTEPSEGSAPGTSESATPESGPGSEPATSGSETPGSEPATSGSETPGSPAGSPTSTEEGTSESATPESGPGTSTEPSEGSAPGTSTEPSEGSAPGSPAGSPTSTEEGTSTEPSEGSAPGTSTEPSEGSAPGTSESATPESGPGTSTEPSEGSAPGTSESATPESGPGSEPATSGSETPGTSTEPSEGSAPGTSTEPSEGSAPGTSESATPESGPGTSESATPESGPGSPAGSPTSTEEGTSESATPESGPGSEPATSGSETPGTSESATPESGPGTSTEPSEGSAPGTSTEPSEGSAPGTSTEPSEGSAPGTSTEPSEGSAPGTSTEPSEGSAPGTSTEPSEGSAPGSPAGSPTSTEEGTSTEPSEGSAPGTSESATPESGPGSEPATSGSETPGTSESATPESGPGSEPATSGSETPGTSESATPESGPGTSTEPSEGSAPGTSESATPESGPGSPAGSPTSTEEGSPAGSPTSTEEGSPAGSPTSTEEGTSESATPESGPGTSTEPSEGSAPGDPSKKQGPWLEEEEEAYGWMDF

SEQ ID NO: 1996 - protein, 670 aa, Artificial Sequence
  Description of Artificial Sequence: Synthetic polypeptide
GPETLCGAELVDALQFVCGDRGFYFNKPTGYGSSSRRAPQTGIVDECCFRSCDLRRLEMYCAPLKPAKSAGGSPAGSPTSTEEGTSESATPESGPGTSTEPSEGSAPGSPAGSPTSTEEGTSTEPSEGSAPGTSTEPSEGSAPGTSESATPESGPGSEPATSGSETPGSEPATSGSETPGSPAGSPTSTEEGTSESATPESGPGTSTEPSEGSAPGTSTEPSEGSAPGSPAGSPTSTEEGTSTEPSEGSAPGTSTEPSEGSAPGTSESATPESGPGTSTEPSEGSAPGTSESATPESGPGSEPATSGSETPGTSTEPSEGSAPGTSTEPSEGSAPGTSESATPESGPGTSESATPESGPGSPAGSPTSTEEGTSESATPESGPGSEPATSGSETPGTSESATPESGPGTSTEPSEGSAPGTSTEPSEGSAPGTSTEPSEGSAPGTSTEPSEGSAPGTSTEPSEGSAPGTSTEPSEGSAPGSPAGSPTSTEEGTSTEPSEGSAPGTSESATPESGPGSEPATSGSETPGTSESATPESGPGSEPATSGSETPGTSESATPESGPGTSTEPSEGSAPGTSESATPESGPGSPAGSPTSTEEGSPAGSPTSTEEGSPAGSPTSTEEGTSESATPESGPGTSTEPSEGSAPGDPSKKQGPWLEEEEEAYGWMDF

SEQ ID NO: 1997 - protein, 667 aa, Artificial Sequence
  Description of Artificial Sequence: Synthetic polypeptide
AYRPSETLCGGELVDTLQFVCGDRGFYFSRPASRVSRRSRGIVEECCFRSCDLALLETYCATPAKSEGGSPAGSPTSTEEGTSESATPESGPGTSTEPSEGSAPGSPAGSPTSTEEGTSTEPSEGSAPGTSTEPSEGSAPGTSESATPESGPGSEPATSGSETPGSEPATSGSETPGSPAGSPTSTEEGTSESATPESGPGTSTEPSEGSAPGTSTEPSEGSAPGSPAGSPTSTEEGTSTEPSEGSAPGTSTEPSEGSAPGTSESATPESGPGTSTEPSEGSAPGTSESATPESGPGSEPATSGSETPGTSTEPSEGSAPGTSTEPSEGSAPGTSESATPESGPGTSESATPESGPGSPAGSPTSTEEGTSESATPESGPGSEPATSGSETPGTSESATPESGPGTSTEPSEGSAPGTSTEPSEGSAPGTSTEPSEGSAPGTSTEPSEGSAPGTSTEPSEGSAPGTSTEPSEGSAPGSPAGSPTSTEEGTSTEPSEGSAPGTSESATPESGPGSEPATSGSETPGTSESATPESGPGSEPATSGSETPGTSESATPESGPGTSTEPSEGSAPGTSESATPESGPGSPAGSPTSTEEGSPAGSPTSTEEGSPAGSPTSTEEGTSESATPESGPGTSTEPSEGSAPGDPSKKQGPWLEEEEEAYGWMDF

SEQ ID NO: 1998 - protein, 749 aa, Artificial Sequence
  Description of Artificial Sequence: Synthetic polypeptide
EESQKKLPSSRITCPQGSVAYGSYCYSLILIPQTWSNAELSCQMHFSGHLAFLLSTGEITFVSSLVKNSLTAYQYIWIGLHDPSHGTLPNGSGWKWSSSNVLTFYNWERNPSIAADRGYCAVLSQKSGFQKWRDFNCENELPYICKFKVGGSPAGSPTSTEEGTSESATPESGPGTSTEPSEGSAPGSPAGSPTSTEEGTSTEPSEGSAPGTSTEPSEGSAPGTSESATPESGPGSEPATSGSETPGSEPATSGSETPGSPAGSPTSTEEGTSESATPESGPGTSTEPSEGSAPGTSTEPSEGSAPGSPAGSPTSTEEGTSTEPSEGSAPGTSTEPSEGSAPGTSESATPESGPGTSTEPSEGSAPGTSESATPESGPGSEPATSGSETPGTSTEPSEGSAPGTSTEPSEGSAPGTSESATPESGPGTSESATPESGPGSPAGSPTSTEEGTSESATPESGPGSEPATSGSETPGTSESATPESGPGTSTEPSEGSAPGTSTEPSEGSAPGTSTEPSEGSAPGTSTEPSEGSAPGTSTEPSEGSAPGTSTEPSEGSAPGSPAGSPTSTEEGTSTEPSEGSAPGTSESATPESGPGSEPATSGSETPGTSESATPESGPGSEPATSGSETPGTSESATPESGPGTSTEPSEGSAPGTSESATPESGPGSPAGSPTSTEEGSPAGSPTSTEEGSPAGSPTSTEEGTSESATPESGPGTSTEPSEGSAPGDPSKKQGPWLEEEEEAYGWMDF

SEQ ID NO: 1999 - protein, 647 aa, Artificial Sequence
  Description of Artificial Sequence: Synthetic polypeptide
TQAQLLRVGCVLGTCQVQNLSHRLWQLMGPAGRQDSAPVDPSSPHSYGGSPAGSPTSTEEGTSESATPESGPGTSTEPSEGSAPGSPAGSPTSTEEGTSTEPSEGSAPGTSTEPSEGSAPGTSESATPESGPGSEPATSGSETPGSEPATSGSETPGSPAGSPTSTEEGTSESATPESGPGTSTEPSEGSAPGTSTEPSEGSAPGSPAGSPTSTEEGTSTEPSEGSAPGTSTEPSEGSAPGTSESATPESGPGTSTEPSEGSAPGTSESATPESGPGSEPATSGSETPGTSTEPSEGSAPGTSTEPSEGSAPGTSESATPESGPGTSESATPESGPGSPAGSPTSTEEGTSESATPESGPGSEPATSGSETPGTSESATPESGPGTSTEPSEGSAPGTSTEPSEGSAPGTSTEPSEGSAPGTSTEPSEGSAPGTSTEPSEGSAPGTSTEPSEGSAPGSPAGSPTSTEEGTSTEPSEGSAPGTSESATPESGPGSEPATSGSETPGTSESATPESGPGSEPATSGSETPGTSESATPESGPGTSTEPSEGSAPGTSESATPESGPGSPAGSPTSTEEGSPAGSPTSTEEGSPAGSPTSTEEGTSESATPESGPGTSTEPSEGSAPGDPSKKQGPWLEEEEEAYGWMDF

SEQ ID NO: 2000 - protein, 746 aa, Artificial Sequence
  Description of Artificial Sequence: Synthetic polypeptide
VPIQKVQDDTKTLIKTIVTRINDISHTQSVSSKQKVTGLDFIPGLHPILTLSKMDQTLAVYQQILTSMPSRNVIQISNDLENLRDLLHVLAFSKSCHLPWASGLETLDSLGGVLEASGYSTEVVALSRLQGSLQDMLWQLDLSPGCGGSPAGSPTSTEEGTSESATPESGPGTSTEPSEGSAPGSPAGSPTSTEEGTSTEPSEGSAPGTSTEPSEGSAPGTSESATPESGPGSEPATSGSETPGSEPATSGSETPGSPAGSPTSTEEGTSESATPESGPGTSTEPSEGSAPGTSTEPSEGSAPGSPAGSPTSTEEGTSTEPSEGSAPGTSTEPSEGSAPGTSESATPESGPGTSTEPSEGSAPGTSESATPESGPGSEPATSGSETPGTSTEPSEGSAPGTSTEPSEGSAPGTSESATPESGPGTSESATPESGPGSPAGSPTSTEEGTSESATPESGPGSEPATSGSETPGTSESATPESGPGTSTEPSEGSAPGTSTEPSEGSAPGTSTEPSEGSAPGTSTEPSEGSAPGTSTEPSEGSAPGTSTEPSEGSAPGSPAGSPTSTEEGTSTEPSEGSAPGTSESATPESGPGSEPATSGSETPGTSESATPESGPGSEPATSGSETPGTSESATPESGPGTSTEPSEGSAPGTSESATPESGPGSPAGSPTSTEEGSPAGSPTSTEEGSPAGSPTSTEEGTSESATPESGPGTSTEPSEGSAPGDPSKKQGPWLEEEEEAYGWMDF

SEQ ID NO: 2001 - protein, 625 aa, Artificial Sequence
  Description of Artificial Sequence: Synthetic polypeptide
FRVDEEFQSPFASQSRGYFLFRPRNGGSPAGSPTSTEEGTSESATPESGPGTSTEPSEGSAPGSPAGSPTSTEEGTSTEPSEGSAPGTSTEPSEGSAPGTSESATPESGPGSEPATSGSETPGSEPATSGSETPGSPAGSPTSTEEGTSESATPESGPGTSTEPSEGSAPGTSTEPSEGSAPGSPAGSPTSTEEGTSTEPSEGSAPGTSTEPSEGSAPGTSESATPESGPGTSTEPSEGSAPGTSESATPESGPGSEPATSGSETPGTSTEPSEGSAPGTSTEPSEGSAPGTSESATPESGPGTSESATPESGPGSPAGSPTSTEEGTSESATPESGPGSEPATSGSETPGTSESATPESGPGTSTEPSEGSAPGTSTEPSEGSAPGTSTEPSEGSAPGTSTEPSEGSAPGTSTEPSEGSAPGTSTEPSEGSAPGSPAGSPTSTEEGTSTEPSEGSAPGTSESATPESGPGSEPATSGSETPGTSESATPESGPGSEPATSGSETPGTSESATPESGPGTSTEPSEGSAPGTSESATPESGPGSPAGSPTSTEEGSPAGSPTSTEEGSPAGSPTSTEEGTSESATPESGPGTSTEPSEGSAPGDPSKKQGPWLEEEEEAYGWMDF

SEQ ID NO: 2002 - protein, 637 aa, Artificial Sequence
  Description of Artificial Sequence: Synthetic polypeptide
HSQGTFTSDYSKYLDSRRAQDFVQWLMNTKRNRNNIAGGSPAGSPTSTEEGTSESATPESGPGTSTEPSEGSAPGSPAGSPTSTEEGTSTEPSEGSAPGTSTEPSEGSAPGTSESATPESGPGSEPATSGSETPGSEPATSGSETPGSPAGSPTSTEEGTSESATPESGPGTSTEPSEGSAPGTSTEPSEGSAPGSPAGSPTSTEEGTSTEPSEGSAPGTSTEPSEGSAPGTSESATPESGPGTSTEPSEGSAPGTSESATPESGPGSEPATSGSETPGTSTEPSEGSAPGTSTEPSEGSAPGTSESATPESGPGTSESATPESGPGSPAGSPTSTEEGTSESATPESGPGSEPATSGSETPGTSESATPESGPGTSTEPSEGSAPGTSTEPSEGSAPGTSTEPSEGSAPGTSTEPSEGSAPGTSTEPSEGSAPGTSTEPSEGSAPGSPAGSPTSTEEGTSTEPSEGSAPGTSESATPESGPGSEPATSGSETPGTSESATPESGPGSEPATSGSETPGTSESATPESGPGTSTEPSEGSAPGTSESATPESGPGSPAGSPTSTEEGSPAGSPTSTEEGSPAGSPTSTEEGTSESATPESGPGTSTEPSEGSAPGDPSKKQGPWLEEEEEAYGWMDF

SEQ ID NO: 2003 - protein, 637 aa, Artificial Sequence
  Description of Artificial Sequence: Synthetic polypeptide
KCNTATCATNRLANFLVHSSNNFGPILPPTNVGSNTYGGSPAGSPTSTEEGTSESATPESGPGTSTEPSEGSAPGSPAGSPTSTEEGTSTEPSEGSAPGTSTEPSEGSAPGTSESATPESGPGSEPATSGSETPGSEPATSGSETPGSPAGSPTSTEEGTSESATPESGPGTSTEPSEGSAPGTSTEPSEGSAPGSPAGSPTSTEEGTSTEPSEGSAPGTSTEPSEGSAPGTSESATPESGPGTSTEPSEGSAPGTSESATPESGPGSEPATSGSETPGTSTEPSEGSAPGTSTEPSEGSAPGTSESATPESGPGTSESATPESGPGSPAGSPTSTEEGTSESATPESGPGSEPATSGSETPGTSESATPESGPGTSTEPSEGSAPGTSTEPSEGSAPGTSTEPSEGSAPGTSTEPSEGSAPGTSTEPSEGSAPGTSTEPSEGSAPGSPAGSPTSTEEGTSTEPSEGSAPGTSESATPESGPGSEPATSGSETPGTSESATPESGPGSEPATSGSETPGTSESATPESGPGTSTEPSEGSAPGTSESATPESGPGSPAGSPTSTEEGSPAGSPTSTEEGSPAGSPTSTEEGTSESATPESGPGTSTEPSEGSAPGDPSKKQGPWLEEEEEAYGWMDF

SEQ ID NO: 2004 - protein, 636 aa, Artificial Sequence
  Description of Artificial Sequence: Synthetic polypeptide
YPIKPEAPGEDASPEELNRYYASLRHYLNLVTRQRYGGSPAGSPTSTEEGTSESATPESGPGTSTEPSEGSAPGSPAGSPTSTEEGTSTEPSEGSAPGTSTEPSEGSAPGTSESATPESGPGSEPATSGSETPGSEPATSGSETPGSPAGSPTSTEEGTSESATPESGPGTSTEPSEGSAPGTSTEPSEGSAPGSPAGSPTSTEEGTSTEPSEGSAPGTSTEPSEGSAPGTSESATPESGPGTSTEPSEGSAPGTSESATPESGPGSEPATSGSETPGTSTEPSEGSAPGTSTEPSEGSAPGTSESATPESGPGTSESATPESGPGSPAGSPTSTEEGTSESATPESGPGSEPATSGSETPGTSESATPESGPGTSTEPSEGSAPGTSTEPSEGSAPGTSTEPSEGSAPGTSTEPSEGSAPGTSTEPSEGSAPGTSTEPSEGSAPGSPAGSPTSTEEGTSTEPSEGSAPGTSESATPESGPGSEPATSGSETPGTSESATPESGPGSEPATSGSETPGTSESATPESGPGTSTEPSEGSAPGTSESATPESGPGSPAGSPTSTEEGSPAGSPTSTEEGSPAGSPTSTEEGTSESATPESGPGTSTEPSEGSAPGDPSKKQGPWLEEEEEAYGWMDF

SEQ ID NO: 2005 - protein, 641 aa, Artificial Sequence
  Description of Artificial Sequence: Synthetic polypeptide
IVLSLDVPIGLLQILLEQARARAAREQATTNARILARVGHCGGSPAGSPTSTEEGTSESATPESGPGTSTEPSEGSAPGSPAGSPTSTEEGTSTEPSEGSAPGTSTEPSEGSAPGTSESATPESGPGSEPATSGSETPGSEPATSGSETPGSPAGSPTSTEEGTSESATPESGPGTSTEPSEGSAPGTSTEPSEGSAPGSPAGSPTSTEEGTSTEPSEGSAPGTSTEPSEGSAPGTSESATPESGPGTSTEPSEGSAPGTSESATPESGPGSEPATSGSETPGTSTEPSEGSAPGTSTEPSEGSAPGTSESATPESGPGTSESATPESGPGSPAGSPTSTEEGTSESATPESGPGSEPATSGSETPGTSESATPESGPGTSTEPSEGSAPGTSTEPSEGSAPGTSTEPSEGSAPGTSTEPSEGSAPGTSTEPSEGSAPGTSTEPSEGSAPGSPAGSPTSTEEGTSTEPSEGSAPGTSESATPESGPGSEPATSGSETPGTSESATPESGPGSEPATSGSETPGTSESATPESGPGTSTEPSEGSAPGTSESATPESGPGSPAGSPTSTEEGSPAGSPTSTEEGSPAGSPTSTEEGTSESATPESGPGTSTEPSEGSAPGDPSKKQGPWLEEEEEAYGWMDF

SEQ ID NO: 2006 - protein, 638 aa, Artificial Sequence
  Description of Artificial Sequence: Synthetic polypeptide
FTLSLDVPTNIMNLLFNIAKAKNLRAQAAANAHLMAQIGGSPAGSPTSTEEGTSESATPESGPGTSTEPSEGSAPGSPAGSPTSTEEGTSTEPSEGSAPGTSTEPSEGSAPGTSESATPESGPGSEPATSGSETPGSEPATSGSETPGSPAGSPTSTEEGTSESATPESGPGTSTEPSEGSAPGTSTEPSEGSAPGSPAGSPTSTEEGTSTEPSEGSAPGTSTEPSEGSAPGTSESATPESGPGTSTEPSEGSAPGTSESATPESGPGSEPATSGSETPGTSTEPSEGSAPGTSTEPSEGSAPGTSESATPESGPGTSESATPESGPGSPAGSPTSTEEGTSESATPESGPGSEPATSGSETPGTSESATPESGPGTSTEPSEGSAPGTSTEPSEGSAPGTSTEPSEGSAPGTSTEPSEGSAPGTSTEPSEGSAPGTSTEPSEGSAPGSPAGSPTSTEEGTSTEPSEGSAPGTSESATPESGPGSEPATSGSETPGTSESATPESGPGSEPATSGSETPGTSESATPESGPGTSTEPSEGSAPGTSESATPESGPGSPAGSPTSTEEGSPAGSPTSTEEGSPAGSPTSTEEGTSESATPESGPGTSTEPSEGSAPGDPSKKQGPWLEEEEEAYGWMDF

SEQ ID NO: 2007 - protein, 649 aa, Artificial Sequence
  Description of Artificial Sequence: Synthetic polypeptide
YAEGTFISDYSIAMDKIHQQDFVNWLLAQKGKKNDWKHNITQGGSPAGSPTSTEEGTSESATPESGPGTSTEPSEGSAPGSPAGSPTSTEEGTSTEPSEGSAPGTSTEPSEGSAPGTSESATPESGPGSEPATSGSETPGSEPATSGSETPGSPAGSPTSTEEGTSESATPESGPGTSTEPSEGSAPGTSTEPSEGSAPGSPAGSPTSTEEGTSTEPSEGSAPGTSTEPSEGSAPGTSESATPESGPGTSTEPSEGSAPGTSESATPESGPGSEPATSGSETPGTSTEPSEGSAPGTSTEPSEGSAPGTSESATPESGPGTSESATPESGPGSPAGSPTSTEEGTSESATPESGPGSEPATSGSETPGTSESATPESGPGTSTEPSEGSAPGTSTEPSEGSAPGTSTEPSEGSAPGTSTEPSEGSAPGTSTEPSEGSAPGTSTEPSEGSAPGSPAGSPTSTEEGTSTEPSEGSAPGTSESATPESGPGSEPATSGSETPGTSESATPESGPGSEPATSGSETPGTSESATPESGPGTSTEPSEGSAPGTSESATPESGPGSPAGSPTSTEEGSPAGSPTSTEEGSPAGSPTSTEEGTSESATPESGPGTSTEPSEGSAPGHSQGTFTSDYSKYLDSRRAQDFVQWLMNT

SEQ ID NO: 2008 - protein, 657 aa, Artificial Sequence
  Description of Artificial Sequence: Synthetic polypeptide
YAEGTFISDYSIAMDKIHQQDFVNWLLAQKGKKNDWKHNITQGGSPAGSPTSTEEGTSESATPESGPGTSTEPSEGSAPGSPAGSPTSTEEGTSTEPSEGSAPGTSTEPSEGSAPGTSESATPESGPGSEPATSGSETPGSEPATSGSETPGSPAGSPTSTEEGTSESATPESGPGTSTEPSEGSAPGTSTEPSEGSAPGSPAGSPTSTEEGTSTEPSEGSAPGTSTEPSEGSAPGTSESATPESGPGTSTEPSEGSAPGTSESATPESGPGSEPATSGSETPGTSTEPSEGSAPGTSTEPSEGSAPGTSESATPESGPGTSESATPESGPGSPAGSPTSTEEGTSESATPESGPGSEPATSGSETPGTSESATPESGPGTSTEPSEGSAPGTSTEPSEGSAPGTSTEPSEGSAPGTSTEPSEGSAPGTSTEPSEGSAPGTSTEPSEGSAPGSPAGSPTSTEEGTSTEPSEGSAPGTSESATPESGPGSEPATSGSETPGTSESATPESGPGSEPATSGSETPGTSESATPESGPGTSTEPSEGSAPGTSESATPESGPGSPAGSPTSTEEGSPAGSPTSTEEGSPAGSPTSTEEGTSESATPESGPGTSTEPSEGSAPGHDEFERHAEGTFTSDVSSTLEGQAALEFIAWLVKGRG

SEQ ID NO: 2009 - protein, 650 aa, Artificial Sequence
  Description of Artificial Sequence: Synthetic polypeptide
YAEGTFISDYSIAMDKIHQQDFVNWLLAQKGKKNDWKHNITQGGSPAGSPTSTEEGTSESATPESGPGTSTEPSEGSAPGSPAGSPTSTEEGTSTEPSEGSAPGTSTEPSEGSAPGTSESATPESGPGSEPATSGSETPGSEPATSGSETPGSPAGSPTSTEEGTSESATPESGPGTSTEPSEGSAPGTSTEPSEGSAPGSPAGSPTSTEEGTSTEPSEGSAPGTSTEPSEGSAPGTSESATPESGPGTSTEPSEGSAPGTSESATPESGPGSEPATSGSETPGTSTEPSEGSAPGTSTEPSEGSAPGTSESATPESGPGTSESATPESGPGSPAGSPTSTEEGTSESATPESGPGSEPATSGSETPGTSESATPESGPGTSTEPSEGSAPGTSTEPSEGSAPGTSTEPSEGSAPGTSTEPSEGSAPGTSTEPSEGSAPGTSTEPSEGSAPGSPAGSPTSTEEGTSTEPSEGSAPGTSESATPESGPGSEPATSGSETPGTSESATPESGPGSEPATSGSETPGTSESATPESGPGTSTEPSEGSAPGTSESATPESGPGSPAGSPTSTEEGSPAGSPTSTEEGSPAGSPTSTEEGTSESATPESGPGTSTEPSEGSAPGHAEGTFTSDVSSYLEGQAALEFIAWLVKGR

SEQ ID NO: 2010 - protein, 653 aa, Artificial Sequence
  Description of Artificial Sequence: Synthetic polypeptide
YAEGTFISDYSIAMDKIHQQDFVNWLLAQKGKKNDWKHNITQGGSPAGSPTSTEEGTSESATPESGPGTSTEPSEGSAPGSPAGSPTSTEEGTSTEPSEGSAPGTSTEPSEGSAPGTSESATPESGPGSEPATSGSETPGSEPATSGSETPGSPAGSPTSTEEGTSESATPESGPGTSTEPSEGSAPGTSTEPSEGSAPGSPAGSPTSTEEGTSTEPSEGSAPGTSTEPSEGSAPGTSESATPESGPGTSTEPSEGSAPGTSESATPESGPGSEPATSGSETPGTSTEPSEGSAPGTSTEPSEGSAPGTSESATPESGPGTSESATPESGPGSPAGSPTSTEEGTSESATPESGPGSEPATSGSETPGTSESATPESGPGTSTEPSEGSAPGTSTEPSEGSAPGTSTEPSEGSAPGTSTEPSEGSAPGTSTEPSEGSAPGTSTEPSEGSAPGSPAGSPTSTEEGTSTEPSEGSAPGTSESATPESGPGSEPATSGSETPGTSESATPESGPGSEPATSGSETPGTSESATPESGPGTSTEPSEGSAPGTSESATPESGPGSPAGSPTSTEEGSPAGSPTSTEEGSPAGSPTSTEEGTSESATPESGPGTSTEPSEGSAPGHADGSFSDEMNTILDNLAARDFINWLIETKITD

SEQ ID NO: 2011 - protein, 690 aa, Artificial Sequence
  Description of Artificial Sequence: Synthetic polypeptide
YAEGTFISDYSIAMDKIHQQDFVNWLLAQKGKKNDWKHNITQGGSPAGSPTSTEEGTSESATPESGPGTSTEPSEGSAPGSPAGSPTSTEEGTSTEPSEGSAPGTSTEPSEGSAPGTSESATPESGPGSEPATSGSETPGSEPATSGSETPGSPAGSPTSTEEGTSESATPESGPGTSTEPSEGSAPGTSTEPSEGSAPGSPAGSPTSTEEGTSTEPSEGSAPGTSTEPSEGSAPGTSESATPESGPGTSTEPSEGSAPGTSESATPESGPGSEPATSGSETPGTSTEPSEGSAPGTSTEPSEGSAPGTSESATPESGPGTSESATPESGPGSPAGSPTSTEEGTSESATPESGPGSEPATSGSETPGTSESATPESGPGTSTEPSEGSAPGTSTEPSEGSAPGTSTEPSEGSAPGTSTEPSEGSAPGTSTEPSEGSAPGTSTEPSEGSAPGSPAGSPTSTEEGTSTEPSEGSAPGTSESATPESGPGSEPATSGSETPGTSESATPESGPGSEPATSGSETPGTSESATPESGPGTSTEPSEGSAPGTSESATPESGPGSPAGSPTSTEEGSPAGSPTSTEEGSPAGSPTSTEEGTSESATPESGPGTSTEPSEGSAPGGPETLCGAELVDALQFVCGDRGFYFNKPTGYGSSSRRAPQTGIVDECCFRSCDLRRLEMYCAPLKPAKSA

SEQ ID NO: 2012 - protein, 687 aa, Artificial Sequence
  Description of Artificial Sequence: Synthetic polypeptide
YAEGTFISDYSIAMDKIHQQDFVNWLLAQKGKKNDWKHNITQGGSPAGSPTSTEEGTSESATPESGPGTSTEPSEGSAPGSPAGSPTSTEEGTSTEPSEGSAPGTSTEPSEGSAPGTSESATPESGPGSEPATSGSETPGSEPATSGSETPGSPAGSPTSTEEGTSESATPESGPGTSTEPSEGSAPGTSTEPSEGSAPGSPAGSPTSTEEGTSTEPSEGSAPGTSTEPSEGSAPGTSESATPESGPGTSTEPSEGSAPGTSESATPESGPGSEPATSGSETPGTSTEPSEGSAPGTSTEPSEGSAPGTSESATPESGPGTSESATPESGPGSPAGSPTSTEEGTSESATPESGPGSEPATSGSETPGTSESATPESGPGTSTEPSEGSAPGTSTEPSEGSAPGTSTEPSEGSAPGTSTEPSEGSAPGTSTEPSEGSAPGTSTEPSEGSAPGSPAGSPTSTEEGTSTEPSEGSAPGTSESATPESGPGSEPATSGSETPGTSESATPESGPGSEPATSGSETPGTSESATPESGPGTSTEPSEGSAPGTSESATPESGPGSPAGSPTSTEEGSPAGSPTSTEEGSPAGSPTSTEEGTSESATPESGPGTSTEPSEGSAPGAYRPSETLCGGELVDTLQFVCGDRGFYFSRPASRVSRRSRGIVEECCFRSCDLALLETYCATPAKSE

SEQ ID NO: 2013 - protein, 769 aa, Artificial Sequence
  Description of Artificial Sequence: Synthetic polypeptide
YAEGTFISDYSIAMDKIHQQDFVNWLLAQKGKKNDWKHNITQGGSPAGSPTSTEEGTSESATPESGPGTSTEPSEGSAPGSPAGSPTSTEEGTSTEPSEGSAPGTSTEPSEGSAPGTSESATPESGPGSEPATSGSETPGSEPATSGSETPGSPAGSPTSTEEGTSESATPESGPGTSTEPSEGSAPGTSTEPSEGSAPGSPAGSPTSTEEGTSTEPSEGSAPGTSTEPSEGSAPGTSESATPESGPGTSTEPSEGSAPGTSESATPESGPGSEPATSGSETPGTSTEPSEGSAPGTSTEPSEGSAPGTSESATPESGPGTSESATPESGPGSPAGSPTSTEEGTSESATPESGPGSEPATSGSETPGTSESATPESGPGTSTEPSEGSAPGTSTEPSEGSAPGTSTEPSEGSAPGTSTEPSEGSAPGTSTEPSEGSAPGTSTEPSEGSAPGSPAGSPTSTEEGTSTEPSEGSAPGTSESATPESGPGSEPATSGSETPGTSESATPESGPGSEPATSGSETPGTSESATPESGPGTSTEPSEGSAPGTSESATPESGPGSPAGSPTSTEEGSPAGSPTSTEEGSPAGSPTSTEEGTSESATPESGPGTSTEPSEGSAPGEESQKKLPSSRITCPQGSVAYGSYCYSLILIPQTWSNAELSCQMHFSGHLAFLLSTGEITFVSSLVKNSLTAYQYIWIGLHDPSHGTLPNGSGWKWSSSNVLTFYNWERNPSIAADRGYCAVLSQKSGFQKWRDFNCENELPYICKFKV

SEQ ID NO: 2014 - protein, 667 aa, Artificial Sequence; identical to SEQ ID NO: 1958
  Description of Artificial Sequence: Synthetic polypeptide

SEQ ID NO: 2015 - protein, 766 aa, Artificial Sequence
  Description of Artificial Sequence: Synthetic polypeptide
YAEGTFISDYSIAMDKIHQQDFVNWLLAQKGKKNDWKHNITQGGSPAGSPTSTEEGTSESATPESGPGTSTEPSEGSAPGSPAGSPTSTEEGTSTEPSEGSAPGTSTEPSEGSAPGTSESATPESGPGSEPATSGSETPGSEPATSGSETPGSPAGSPTSTEEGTSESATPESGPGTSTEPSEGSAPGTSTEPSEGSAPGSPAGSPTSTEEGTSTEPSEGSAPGTSTEPSEGSAPGTSESATPESGPGTSTEPSEGSAPGTSESATPESGPGSEPATSGSETPGTSTEPSEGSAPGTSTEPSEGSAPGTSESATPESGPGTSESATPESGPGSPAGSPTSTEEGTSESATPESGPGSEPATSGSETPGTSESATPESGPGTSTEPSEGSAPGTSTEPSEGSAPGTSTEPSEGSAPGTSTEPSEGSAPGTSTEPSEGSAPGTSTEPSEGSAPGSPAGSPTSTEEGTSTEPSEGSAPGTSESATPESGPGSEPATSGSETPGTSESATPESGPGSEPATSGSETPGTSESATPESGPGTSTEPSEGSAPGTSESATPESGPGSPAGSPTSTEEGSPAGSPTSTEEGSPAGSPTSTEEGTSESATPESGPGTSTEPSEGSAPGVPIQKVQDDTKTLIKTIVTRINDISHTQSVSSKQKVTGLDFIPGLHPILTLSKMDQTLAVYQQILTSMPSRNVIQISNDLENLRDLLHVLAFSKSCHLPWASGLETLDSLGGVLEASGYSTEVVALSRLQGSLQDMLWQLDLSPGC

SEQ ID NO: 2016 - protein, 645 aa, Artificial Sequence
  Description of Artificial Sequence: Synthetic polypeptide
YAEGTFISDYSIAMDKIHQQDFVNWLLAQKGKKNDWKHNITQGGSPAGSPTSTEEGTSESATPESGPGTSTEPSEGSAPGSPAGSPTSTEEGTSTEPSEGSAPGTSTEPSEGSAPGTSESATPESGPGSEPATSGSETPGSEPATSGSETPGSPAGSPTSTEEGTSESATPESGPGTSTEPSEGSAPGTSTEPSEGSAPGSPAGSPTSTEEGTSTEPSEGSAPGTSTEPSEGSAPGTSESATPESGPGTSTEPSEGSAPGTSESATPESGPGSEPATSGSETPGTSTEPSEGSAPGTSTEPSEGSAPGTSESATPESGPGTSESATPESGPGSPAGSPTSTEEGTSESATPESGPGSEPATSGSETPGTSESATPESGPGTSTEPSEGSAPGTSTEPSEGSAPGTSTEPSEGSAPGTSTEPSEGSAPGTSTEPSEGSAPGTSTEPSEGSAPGSPAGSPTSTEEGTSTEPSEGSAPGTSESATPESGPGSEPATSGSETPGTSESATPESGPGSEPATSGSETPGTSESATPESGPGTSTEPSEGSAPGTSESATPESGPGSPAGSPTSTEEGSPAGSPTSTEEGSPAGSPTSTEEGTSESATPESGPGTSTEPSEGSAPGFRVDEEFQSPFASQSRGYFLFRPRN

SEQ ID NO: 2017 - protein, 657 aa, Artificial Sequence
  Description of Artificial Sequence: Synthetic polypeptide
YAEGTFISDYSIAMDKIHQQDFVNWLLAQKGKKNDWKHNITQGGSPAGSPTSTEEGTSESATPESGPGTSTEPSEGSAPGSPAGSPTSTEEGTSTEPSEGSAPGTSTEPSEGSAPGTSESATPESGPGSEPATSGSETPGSEPATSGSETPGSPAGSPTSTEEGTSESATPESGPGTSTEPSEGSAPGTSTEPSEGSAPGSPAGSPTSTEEGTSTEPSEGSAPGTSTEPSEGSAPGTSESATPESGPGTSTEPSEGSAPGTSESATPESGPGSEPATSGSETPGTSTEPSEGSAPGTSTEPSEGSAPGTSESATPESGPGTSESATPESGPGSPAGSPTSTEEGTSESATPESGPGSEPATSGSETPGTSESATPESGPGTSTEPSEGSAPGTSTEPSEGSAPGTSTEPSEGSAPGTSTEPSEGSAPGTSTEPSEGSAPGTSTEPSEGSAPGSPAGSPTSTEEGTSTEPSEGSAPGTSESATPESGPGSEPATSGSETPGTSESATPESGPGSEPATSGSETPGTSESATPESGPGTSTEPSEGSAPGTSESATPESGPGSPAGSPTSTEEGSPAGSPTSTEEGSPAGSPTSTEEGTSESATPESGPGTSTEPSEGSAPGHSQGTFTSDYSKYLDSRRAQDFVQWLMNTKRNRNNIA

SEQ ID NO: 2018 - protein, 657 aa, Artificial Sequence; identical to SEQ ID NO: 1767
  Description of Artificial Sequence: Synthetic polypeptide

SEQ ID NO: 2019 - protein, 656 aa, Artificial Sequence
  Description of Artificial Sequence: Synthetic polypeptide
YAEGTFISDYSIAMDKIHQQDFVNWLLAQKGKKNDWKHNITQGGSPAGSPTSTEEGTSESATPESGPGTSTEPSEGSAPGSPAGSPTSTEEGTSTEPSEGSAPGTSTEPSEGSAPGTSESATPESGPGSEPATSGSETPGSEPATSGSETPGSPAGSPTSTEEGTSESATPESGPGTSTEPSEGSAPGTSTEPSEGSAPGSPAGSPTSTEEGTSTEPSEGSAPGTSTEPSEGSAPGTSESATPESGPGTSTEPSEGSAPGTSESATPESGPGSEPATSGSETPGTSTEPSEGSAPGTSTEPSEGSAPGTSESATPESGPGTSESATPESGPGSPAGSPTSTEEGTSESATPESGPGSEPATSGSETPGTSESATPESGPGTSTEPSEGSAPGTSTEPSEGSAPGTSTEPSEGSAPGTSTEPSEGSAPGTSTEPSEGSAPGTSTEPSEGSAPGSPAGSPTSTEEGTSTEPSEGSAPGTSESATPESGPGSEPATSGSETPGTSESATPESGPGSEPATSGSETPGTSESATPESGPGTSTEPSEGSAPGTSESATPESGPGSPAGSPTSTEEGSPAGSPTSTEEGSPAGSPTSTEEGTSESATPESGPGTSTEPSEGSAPGYPIKPEAPGEDASPEELNRYYASLRHYLNLVTRQRY

SEQ ID NO: 2020 - protein, 661 aa, Artificial Sequence
  Description of Artificial Sequence: Synthetic polypeptide
YAEGTFISDYSIAMDKIHQQDFVNWLLAQKGKKNDWKHNITQGGSPAGSPTSTEEGTSESATPESGPGTSTEPSEGSAPGSPAGSPTSTEEGTSTEPSEGSAPGTSTEPSEGSAPGTSESATPESGPGSEPATSGSETPGSEPATSGSETPGSPAGSPTSTEEGTSESATPESGPGTSTEPSEGSAPGTSTEPSEGSAPGSPAGSPTSTEEGTSTEPSEGSAPGTSTEPSEGSAPGTSESATPESGPGTSTEPSEGSAPGTSESATPESGPGSEPATSGSETPGTSTEPSEGSAPGTSTEPSEGSAPGTSESATPESGPGTSESATPESGPGSPAGSPTSTEEGTSESATPESGPGSEPATSGSETPGTSESATPESGPGTSTEPSEGSAPGTSTEPSEGSAPGTSTEPSEGSAPGTSTEPSEGSAPGTSTEPSEGSAPGTSTEPSEGSAPGSPAGSPTSTEEGTSTEPSEGSAPGTSESATPESGPGSEPATSGSETPGTSESATPESGPGSEPATSGSETPGTSESATPESGPGTSTEPSEGSAPGTSESATPESGPGSPAGSPTSTEEGSPAGSPTSTEEGSPAGSPTSTEEGTSESATPESGPGTSTEPSEGSAPGIVLSLDVPIGLLQILLEQARARAAREQATTNARILARVGHC

SEQ ID NO: 2021 - protein, 658 aa, Artificial Sequence
  Description of Artificial Sequence: Synthetic polypeptide
YAEGTFISDYSIAMDKIHQQDFVNWLLAQKGKKNDWKHNITQGGSPAGSPTSTEEGTSESATPESGPGTSTEPSEGSAPGSPAGSPTSTEEGTSTEPSEGSAPGTSTEPSEGSAPGTSESATPESGPGSEPATSGSETPGSEPATSGSETPGSPAGSPTSTEEGTSESATPESGPGTSTEPSEGSAPGTSTEPSEGSAPGSPAGSPTSTEEGTSTEPSEGSAPGTSTEPSEGSAPGTSESATPESGPGTSTEPSEGSAPGTSESATPESGPGSEPATSGSETPGTSTEPSEGSAPGTSTEPSEGSAPGTSESATPESGPGTSESATPESGPGSPAGSPTSTEEGTSESATPESGPGSEPATSGSETPGTSESATPESGPGTSTEPSEGSAPGTSTEPSEGSAPGTSTEPSEGSAPGTSTEPSEGSAPGTSTEPSEGSAPGTSTEPSEGSAPGSPAGSPTSTEEGTSTEPSEGSAPGTSESATPESGPGSEPATSGSETPGTSESATPESGPGSEPATSGSETPGTSESATPESGPGTSTEPSEGSAPGTSESATPESGPGSPAGSPTSTEEGSPAGSPTSTEEGSPAGSPTSTEEGTSESATPESGPGTSTEPSEGSAPGFTLSLDVPTNIMNLLFNIAKAKNLRAQAAANAHLMAQI

SEQ ID NO: 2022 - protein, 649 aa, Artificial Sequence
  Description of Artificial Sequence: Synthetic polypeptide
HSQGTFTSDYSKYLDSRRAQDFVQWLMNTGGSPAGSPTSTEEGTSESATPESGPGTSTEPSEGSAPGSPAGSPTSTEEGTSTEPSEGSAPGTSTEPSEGSAPGTSESATPESGPGSEPATSGSETPGSEPATSGSETPGSPAGSPTSTEEGTSESATPESGPGTSTEPSEGSAPGTSTEPSEGSAPGSPAGSPTSTEEGTSTEPSEGSAPGTSTEPSEGSAPGTSESATPESGPGTSTEPSEGSAPGTSESATPESGPGSEPATSGSETPGTSTEPSEGSAPGTSTEPSEGSAPGTSESATPESGPGTSESATPESGPGSPAGSPTSTEEGTSESATPESGPGSEPATSGSETPGTSESATPESGPGTSTEPSEGSAPGTSTEPSEGSAPGTSTEPSEGSAPGTSTEPSEGSAPGTSTEPSEGSAPGTSTEPSEGSAPGSPAGSPTSTEEGTSTEPSEGSAPGTSESATPESGPGSEPATSGSETPGTSESATPESGPGSEPATSGSETPGTSESATPESGPGTSTEPSEGSAPGTSESATPESGPGSPAGSPTSTEEGSPAGSPTSTEEGSPAGSPTSTEEGTSESATPESGPGTSTEPSEGSAPGYAEGTFISDYSIAMDKIHQQDFVNWLLAQKGKKNDWKHNITQ

SEQ ID NO: 2023 - protein, 657 aa, Artificial Sequence
  Description of Artificial Sequence: Synthetic polypeptide
HDEFERHAEGTFTSDVSSTLEGQAALEFIAWLVKGRGGGSPAGSPTSTEEGTSESATPESGPGTSTEPSEGSAPGSPAGSPTSTEEGTSTEPSEGSAPGTSTEPSEGSAPGTSESATPESGPGSEPATSGSETPGSEPATSGSETPGSPAGSPTSTEEGTSESATPESGPGTSTEPSEGSAPGTSTEPSEGSAPGSPAGSPTSTEEGTSTEPSEGSAPGTSTEPSEGSAPGTSESATPESGPGTSTEPSEGSAPGTSESATPESGPGSEPATSGSETPGTSTEPSEGSAPGTSTEPSEGSAPGTSESATPESGPGTSESATPESGPGSPAGSPTSTEEGTSESATPESGPGSEPATSGSETPGTSESATPESGPGTSTEPSEGSAPGTSTEPSEGSAPGTSTEPSEGSAPGTSTEPSEGSAPGTSTEPSEGSAPGTSTEPSEGSAPGSPAGSPTSTEEGTSTEPSEGSAPGTSESATPESGPGSEPATSGSETPGTSESATPESGPGSEPATSGSETPGTSESATPESGPGTSTEPSEGSAPGTSESATPESGPGSPAGSPTSTEEGSPAGSPTSTEEGSPAGSPTSTEEGTSESATPESGPGTSTEPSEGSAPGYAEGTFISDYSIAMDKIHQQDFVNWLLAQKGKKNDWKHNITQ

SEQ ID NO: 2024 - protein, 650 aa, Artificial Sequence
  Description of Artificial Sequence: Synthetic polypeptide
HAEGTFTSDVSSYLEGQAALEFIAWLVKGRGGSPAGSPTSTEEGTSESATPESGPGTSTEPSEGSAPGSPAGSPTSTEEGTSTEPSEGSAPGTSTEPSEGSAPGTSESATPESGPGSEPATSGSETPGSEPATSGSETPGSPAGSPTSTEEGTSESATPESGPGTSTEPSEGSAPGTSTEPSEGSAPGSPAGSPTSTEEGTSTEPSEGSAPGTSTEPSEGSAPGTSESATPESGPGTSTEPSEGSAPGTSESATPESGPGSEPATSGSETPGTSTEPSEGSAPGTSTEPSEGSAPGTSESATPESGPGTSESATPESGPGSPAGSPTSTEEGTSESATPESGPGSEPATSGSETPGTSESATPESGPGTSTEPSEGSAPGTSTEPSEGSAPGTSTEPSEGSAPGTSTEPSEGSAPGTSTEPSEGSAPGTSTEPSEGSAPGSPAGSPTSTEEGTSTEPSEGSAPGTSESATPESGPGSEPATSGSETPGTSESATPESGPGSEPATSGSETPGTSESATPESGPGTSTEPSEGSAPGTSESATPESGPGSPAGSPTSTEEGSPAGSPTSTEEGSPAGSPTSTEEGTSESATPESGPGTSTEPSEGSAPGYAEGTFISDYSIAMDKIHQQDFVNWLLAQKGKKNDWKHNITQ

SEQ ID NO: 2025 - protein, 653 aa, Artificial Sequence
  Description of Artificial Sequence: Synthetic polypeptide
HADGSFSDEMNTILDNLAARDFINWLIETKITDGGSPAGSPTSTEEGTSESATPESGPGTSTEPSEGSAPGSPAGSPTSTEEGTSTEPSEGSAPGTSTEPSEGSAPGTSESATPESGPGSEPATSGSETPGSEPATSGSETPGSPAGSPTSTEEGTSESATPESGPGTSTEPSEGSAPGTSTEPSEGSAPGSPAGSPTSTEEGTSTEPSEGSAPGTSTEPSEGSAPGTSESATPESGPGTSTEPSEGSAPGTSESATPESGPGSEPATSGSETPGTSTEPSEGSAPGTSTEPSEGSAPGTSESATPESGPGTSESATPESGPGSPAGSPTSTEEGTSESATPESGPGSEPATSGSETPGTSESATPESGPGTSTEPSEGSAPGTSTEPSEGSAPGTSTEPSEGSAPGTSTEPSEGSAPGTSTEPSEGSAPGTSTEPSEGSAPGSPAGSPTSTEEGTSTEPSEGSAPGTSESATPESGPGSEPATSGSETPGTSESATPESGPGSEPATSGSETPGTSESATPESGPGTSTEPSEGSAPGTSESATPESGPGSPAGSPTSTEEGSPAGSPTSTEEGSPAGSPTSTEEGTSESATPESGPGTSTEPSEGSAPGYAEGTFISDYSIAMDKIHQQDFVNWLLAQKGKKNDWKHNITQ

SEQ ID NO: 2026 - protein, 690 aa, Artificial Sequence
  Description of Artificial Sequence: Synthetic polypeptide
GPETLCGAELVDALQFVCGDRGFYFNKPTGYGSSSRRAPQTGIVDECCFRSCDLRRLEMYCAPLKPAKSAGGSPAGSPTSTEEGTSESATPESGPGTSTEPSEGSAPGSPAGSPTSTEEGTSTEPSEGSAPGTSTEPSEGSAPGTSESATPESGPGSEPATSGSETPGSEPATSGSETPGSPAGSPTSTEEGTSESATPESGPGTSTEPSEGSAPGTSTEPSEGSAPGSPAGSPTSTEEGTSTEPSEGSAPGTSTEPSEGSAPGTSESATPESGPGTSTEPSEGSAPGTSESATPESGPGSEPATSGSETPGTSTEPSEGSAPGTSTEPSEGSAPGTSESATPESGPGTSESATPESGPGSPAGSPTSTEEGTSESATPESGPGSEPATSGSETPGTSESATPESGPGTSTEPSEGSAPGTSTEPSEGSAPGTSTEPSEGSAPGTSTEPSEGSAPGTSTEPSEGSAPGTSTEPSEGSAPGSPAGSPTSTEEGTSTEPSEGSAPGTSESATPESGPGSEPATSGSETPGTSESATPESGPGSEPATSGSETPGTSESATPESGPGTSTEPSEGSAPGTSESATPESGPGSPAGSPTSTEEGSPAGSPTSTEEGSPAGSPTSTEEGTSESATPESGPGTSTEPSEGSAPGYAEGTFISDYSIAMDKIHQQDFVNWLLAQKGKKNDWKHNITQ

SEQ ID NO: 2027 - protein, 687 aa, Artificial Sequence
  Description of Artificial Sequence: Synthetic polypeptide
AYRPSETLCGGELVDTLQFVCGDRGFYFSRPASRVSRRSRGIVEECCFRSCDLALLETYCATPAKSEGGSPAGSPTSTEEGTSESATPESGPGTSTEPSEGSAPGSPAGSPTSTEEGTSTEPSEGSAPGTSTEPSEGSAPGTSESATPESGPGSEPATSGSETPGSEPATSGSETPGSPAGSPTSTEEGTSESATPESGPGTSTEPSEGSAPGTSTEPSEGSAPGSPAGSPTSTEEGTSTEPSEGSAPGTSTEPSEGSAPGTSESATPESGPGTSTEPSEGSAPGTSESATPESGPGSEPATSGSETPGTSTEPSEGSAPGTSTEPSEGSAPGTSESATPESGPGTSESATPESGPGSPAGSPTSTEEGTSESATPESGPGSEPATSGSETPGTSESATPESGPGTSTEPSEGSAPGTSTEPSEGSAPGTSTEPSEGSAPGTSTEPSEGSAPGTSTEPSEGSAPGTSTEPSEGSAPGSPAGSPTSTEEGTSTEPSEGSAPGTSESATPESGPGSEPATSGSETPGTSESATPESGPGSEPATSGSETPGTSESATPESGPGTSTEPSEGSAPGTSESATPESGPGSPAGSPTSTEEGSPAGSPTSTEEGSPAGSPTSTEEGTSESATPESGPGTSTEPSEGSAPGYAEGTFISDYSIAMDKIHQQDFVNWLLAQKGKKNDWKHNITQ

SEQ ID NO: 2028 - protein, 769 aa, Artificial Sequence
  Description of Artificial Sequence: Synthetic polypeptide
EESQKKLPSSRITCPQGSVAYGSYCYSLILIPQTWSNAELSCQMHFSGHLAFLLSTGEITFVSSLVKNSLTAYQYIWIGLHDPSHGTLPNGSGWKWSSSNVLTFYNWERNPSIAADRGYCAVLSQKSGFQKWRDFNCENELPYICKFKVGGSPAGSPTSTEEGTSESATPESGPGTSTEPSEGSAPGSPAGSPTSTEEGTSTEPSEGSAPGTSTEPSEGSAPGTSESATPESGPGSEPATSGSETPGSEPATSGSETPGSPAGSPTSTEEGTSESATPESGPGTSTEPSEGSAPGTSTEPSEGSAPGSPAGSPTSTEEGTSTEPSEGSAPGTSTEPSEGSAPGTSESATPESGPGTSTEPSEGSAPGTSESATPESGPGSEPATSGSETPGTSTEPSEGSAPGTSTEPSEGSAPGTSESATPESGPGTSESATPESGPGSPAGSPTSTEEGTSESATPESGPGSEPATSGSETPGTSESATPESGPGTSTEPSEGSAPGTSTEPSEGSAPGTSTEPSEGSAPGTSTEPSEGSAPGTSTEPSEGSAPGTSTEPSEGSAPGSPAGSPTSTEEGTSTEPSEGSAPGTSESATPESGPGSEPATSGSETPGTSESATPESGPGSEPATSGSETPGTSESATPESGPGTSTEPSEGSAPGTSESATPESGPGSPAGSPTSTEEGSPAGSPTSTEEGSPAGSPTSTEEGTSESATPESGPGTSTEPSEGSAPGYAEGTFISDYSIAMDKIHQQDFVNWLLAQKGKKNDWKHNITQ

SEQ ID NO: 2029 - protein, 667 aa, Artificial Sequence
  Description of Artificial Sequence: Synthetic polypeptide
TQAQLLRVGCVLGTCQVQNLSHRLWQLMGPAGRQDSAPVDPSSPHSYGGSPAGSPTSTEEGTSESATPESGPGTSTEPSEGSAPGSPAGSPTSTEEGTSTEPSEGSAPGTSTEPSEGSAPGTSESATPESGPGSEPATSGSETPGSEPATSGSETPGSPAGSPTSTEEGTSESATPESGPGTSTEPSEGSAPGTSTEPSEGSAPGSPAGSPTSTEEGTSTEPSEGSAPGTSTEPSEGSAPGTSESATPESGPGTSTEPSEGSAPGTSESATPESGPGSEPATSGSETPGTSTEPSEGSAPGTSTEPSEGSAPGTSESATPESGPGTSESATPESGPGSPAGSPTSTEEGTSESATPESGPGSEPATSGSETPGTSESATPESGPGTSTEPSEGSAPGTSTEPSEGSAPGTSTEPSEGSAPGTSTEPSEGSAPGTSTEPSEGSAPGTSTEPSEGSAPGSPAGSPTSTEEGTSTEPSEGSAPGTSESATPESGPGSEPATSGSETPGTSESATPESGPGSEPATSGSETPGTSESATPESGPGTSTEPSEGSAPGTSESATPESGPGSPAGSPTSTEEGSPAGSPTSTEEGSPAGSPTSTEEGTSESATPESGPGTSTEPSEGSAPGYAEGTFISDYSIAMDKIHQQDFVNWLLAQKGKKNDWKHNITQ

SEQ ID NO: 2030 - protein, 766 aa, Artificial Sequence
  Description of Artificial Sequence: Synthetic polypeptide
VPIQKVQDDTKTLIKTIVTRINDISHTQSVSSKQKVTGLDFIPGLHPILTLSKMDQTLAVYQQILTSMPSRNVIQISNDLENLRDLLHVLAFSKSCHLPWASGLETLDSLGGVLEASGYSTEVVALSRLQGSLQDMLWQLDLSPGCGGSPAGSPTSTEEGTSESATPESGPGTSTEPSEGSAPGSPAGSPTSTEEGTSTEPSEGSAPGTSTEPSEGSAPGTSESATPESGPGSEPATSGSETPGSEPATSGSETPGSPAGSPTSTEEGTSESATPESGPGTSTEPSEGSAPGTSTEPSEGSAPGSPAGSPTSTEEGTSTEPSEGSAPGTSTEPSEGSAPGTSESATPESGPGTSTEPSEGSAPGTSESATPESGPGSEPATSGSETPGTSTEPSEGSAPGTSTEPSEGSAPGTSESATPESGPGTSESATPESGPGSPAGSPTSTEEGTSESATPESGPGSEPATSGSETPGTSESATPESGPGTSTEPSEGSAPGTSTEPSEGSAPGTSTEPSEGSAPGTSTEPSEGSAPGTSTEPSEGSAPGTSTEPSEGSAPGSPAGSPTSTEEGTSTEPSEGSAPGTSESATPESGPGSEPATSGSETPGTSESATPESGPGSEPATSGSETPGTSESATPESGPGTSTEPSEGSAPGTSESATPESGPGSPAGSPTSTEEGSPAGSPTSTEEGSPAGSPTSTEEGTSESATPESGPGTSTEPSEGSAPGYAEGTFISDYSIAMDKIHQQDFVNWLLAQKGKKNDWKHNITQ

SEQ ID NO: 2031 - protein, 645 aa, Artificial Sequence
  Description of Artificial Sequence: Synthetic polypeptide
FRVDEEFQSPFASQSRGYFLFRPRNGGSPAGSPTSTEEGTSESATPESGPGTSTEPSEGSAPGSPAGSPTSTEEGTSTEPSEGSAPGTSTEPSEGSAPGTSESATPESGPGSEPATSGSETPGSEPATSGSETPGSPAGSPTSTEEGTSESATPESGPGTSTEPSEGSAPGTSTEPSEGSAPGSPAGSPTSTEEGTSTEPSEGSAPGTSTEPSEGSAPGTSESATPESGPGTSTEPSEGSAPGTSESATPESGPGSEPATSGSETPGTSTEPSEGSAPGTSTEPSEGSAPGTSESATPESGPGTSESATPESGPGSPAGSPTSTEEGTSESATPESGPGSEPATSGSETPGTSESATPESGPGTSTEPSEGSAPGTSTEPSEGSAPGTSTEPSEGSAPGTSTEPSEGSAPGTSTEPSEGSAPGTSTEPSEGSAPGSPAGSPTSTEEGTSTEPSEGSAPGTSESATPESGPGSEPATSGSETPGTSESATPESGPGSEPATSGSETPGTSESATPESGPGTSTEPSEGSAPGTSESATPESGPGSPAGSPTSTEEGSPAGSPTSTEEGSPAGSPTSTEEGTSESATPESGPGTSTEPSEGSAPGYAEGTFISDYSIAMDKIHQQDFVNWLLAQKGKKNDWKHNITQ

SEQ ID NO: 2032 - protein, 657 aa, Artificial Sequence
  Description of Artificial Sequence: Synthetic polypeptide
HSQGTFTSDYSKYLDSRRAQDFVQWLMNTKRNRNNIAGGSPAGSPTSTEEGTSESATPESGPGTSTEPSEGSAPGSPAGSPTSTEEGTSTEPSEGSAPGTSTEPSEGSAPGTSESATPESGPGSEPATSGSETPGSEPATSGSETPGSPAGSPTSTEEGTSESATPESGPGTSTEPSEGSAPGTSTEPSEGSAPGSPAGSPTSTEEGTSTEPSEGSAPGTSTEPSEGSAPGTSESATPESGPGTSTEPSEGSAPGTSESATPESGPGSEPATSGSETPGTSTEPSEGSAPGTSTEPSEGSAPGTSESATPESGPGTSESATPESGPGSPAGSPTSTEEGTSESATPESGPGSEPATSGSETPGTSESATPESGPGTSTEPSEGSAPGTSTEPSEGSAPGTSTEPSEGSAPGTSTEPSEGSAPGTSTEPSEGSAPGTSTEPSEGSAPGSPAGSPTSTEEGTSTEPSEGSAPGTSESATPESGPGSEPATSGSETPGTSESATPESGPGSEPATSGSETPGTSESATPESGPGTSTEPSEGSAPGTSESATPESGPGSPAGSPTSTEEGSPAGSPTSTEEGSPAGSPTSTEEGTSESATPESGPGTSTEPSEGSAPGYAEGTFISDYSIAMDKIHQQDFVNWLLAQKGKKNDWKHNITQ

SEQ ID NO: 2033 - protein, 657 aa, Artificial Sequence
  Description of Artificial Sequence: Synthetic polypeptide
KCNTATCATNRLANFLVHSSNNFGPILPPTNVGSNTYGGSPAGSPTSTEEGTSESATPESGPGTSTEPSEGSAPGSPAGSPTSTEEGTSTEPSEGSAPGTSTEPSEGSAPGTSESATPESGPGSEPATSGSETPGSEPATSGSETPGSPAGSPTSTEEGTSESATPESGPGTSTEPSEGSAPGTSTEPSEGSAPGSPAGSPTSTEEGTSTEPSEGSAPGTSTEPSEGSAPGTSESATPESGPGTSTEPSEGSAPGTSESATPESGPGSEPATSGSETPGTSTEPSEGSAPGTSTEPSEGSAPGTSESATPESGPGTSESATPESGPGSPAGSPTSTEEGTSESATPESGPGSEPATSGSETPGTSESATPESGPGTSTEPSEGSAPGTSTEPSEGSAPGTSTEPSEGSAPGTSTEPSEGSAPGTSTEPSEGSAPGTSTEPSEGSAPGSPAGSPTSTEEGTSTEPSEGSAPGTSESATPESGPGSEPATSGSETPGTSESATPESGPGSEPATSGSETPGTSESATPESGPGTSTEPSEGSAPGTSESATPESGPGSPAGSPTSTEEGSPAGSPTSTEEGSPAGSPTSTEEGTSESATPESGPGTSTEPSEGSAPGYAEGTFISDYSIAMDKIHQQDFVNWLLAQKGKKNDWKHNITQ

SEQ ID NO: 2034 - protein, 656 aa, Artificial Sequence
  Description of Artificial Sequence: Synthetic polypeptide
YPIKPEAPGEDASPEELNRYYASLRHYLNLVTRQRYGGSPAGSPTSTEEGTSESATPESGPGTSTEPSEGSAPGSPAGSPTSTEEGTSTEPSEGSAPGTSTEPSEGSAPGTSESATPESGPGSEPATSGSETPGSEPATSGSETPGSPAGSPTSTEEGTSESATPESGPGTSTEPSEGSAPGTSTEPSEGSAPGSPAGSPTSTEEGTSTEPSEGSAPGTSTEPSEGSAPGTSESATPESGPGTSTEPSEGSAPGTSESATPESGPGSEPATSGSETPGTSTEPSEGSAPGTSTEPSEGSAPGTSESATPESGPGTSESATPESGPGSPAGSPTSTEEGTSESATPESGPGSEPATSGSETPGTSESATPESGPGTSTEPSEGSAPGTSTEPSEGSAPGTSTEPSEGSAPGTSTEPSEGSAPGTSTEPSEGSAPGTSTEPSEGSAPGSPAGSPTSTEEGTSTEPSEGSAPGTSESATPESGPGSEPATSGSETPGTSESATPESGPGSEPATSGSETPGTSESATPESGPGTSTEPSEGSAPGTSESATPESGPGSPAGSPTSTEEGSPAGSPTSTEEGSPAGSPTSTEEGTSESATPESGPGTSTEPSEGSAPGYAEGTFISDYSIAMDKIHQQDFVNWLLAQKGKKNDWKHNITQ

SEQ ID NO: 2035 - protein, 661 aa, Artificial Sequence
  Description of Artificial Sequence: Synthetic polypeptide
IVLSLDVPIGLLQILLEQARARAAREQATTNARILARVGHCGGSPAGSPTSTEEGTSESATPESGPGTSTEPSEGSAPGSPAGSPTSTEEGTSTEPSEGSAPGTSTEPSEGSAPGTSESATPESGPGSEPATSGSETPGSEPATSGSETPGSPAGSPTSTEEGTSESATPESGPGTSTEPSEGSAPGTSTEPSEGSAPGSPAGSPTSTEEGTSTEPSEGSAPGTSTEPSEGSAPGTSESATPESGPGTSTEPSEGSAPGTSESATPESGPGSEPATSGSETPGTSTEPSEGSAPGTSTEPSEGSAPGTSESATPESGPGTSESATPESGPGSPAGSPTSTEEGTSESATPESGPGSEPATSGSETPGTSESATPESGPGTSTEPSEGSAPGTSTEPSEGSAPGTSTEPSEGSAPGTSTEPSEGSAPGTSTEPSEGSAPGTSTEPSEGSAPGSPAGSPTSTEEGTSTEPSEGSAPGTSESATPESGPGSEPATSGSETPGTSESATPESGPGSEPATSGSETPGTSESATPESGPGTSTEPSEGSAPGTSESATPESGPGSPAGSPTSTEEGSPAGSPTSTEEGSPAGSPTSTEEGTSESATPESGPGTSTEPSEGSAPGYAEGTFISDYSIAMDKIHQQDFVNWLLAQKGKKNDWKHNITQ

SEQ ID NO: 2036 - protein, 658 aa, Artificial Sequence
  Description of Artificial Sequence: Synthetic polypeptide
FTLSLDVPTNIMNLLFNIAKAKNLRAQAAANAHLMAQIGGSPAGSPTSTEEGTSESATPESGPGTSTEPSEGSAPGSPAGSPTSTEEGTSTEPSEGSAPGTSTEPSEGSAPGTSESATPESGPGSEPATSGSETPGSEPATSGSETPGSPAGSPTSTEEGTSESATPESGPGTSTEPSEGSAPGTSTEPSEGSAPGSPAGSPTSTEEGTSTEPSEGSAPGTSTEPSEGSAPGTSESATPESGPGTSTEPSEGSAPGTSESATPESGPGSEPATSGSETPGTSTEPSEGSAPGTSTEPSEGSAPGTSESATPESGPGTSESATPESGPGSPAGSPTSTEEGTSESATPESGPGSEPATSGSETPGTSESATPESGPGTSTEPSEGSAPGTSTEPSEGSAPGTSTEPSEGSAPGTSTEPSEGSAPGTSTEPSEGSAPGTSTEPSEGSAPGSPAGSPTSTEEGTSTEPSEGSAPGTSESATPESGPGSEPATSGSETPGTSESATPESGPGSEPATSGSETPGTSESATPESGPGTSTEPSEGSAPGTSESATPESGPGSPAGSPTSTEEGSPAGSPTSTEEGSPAGSPTSTEEGTSESATPESGPGTSTEPSEGSAPGYAEGTFISDYSIAMDKIHQQDFVNWLLAQKGKKNDWKHNITQ

SEQ ID NO: 2037 - protein, 645 aa, Artificial Sequence
  Description of Artificial Sequence: Synthetic polypeptide
HDEFERHAEGTFTSDVSSTLEGQAALEFIAWLVKGRGGGSPAGSPTSTEEGTSESATPESGPGTSTEPSEGSAPGSPAGSPTSTEEGTSTEPSEGSAPGTSTEPSEGSAPGTSESATPESGPGSEPATSGSETPGSEPATSGSETPGSPAGSPTSTEEGTSESATPESGPGTSTEPSEGSAPGTSTEPSEGSAPGSPAGSPTSTEEGTSTEPSEGSAPGTSTEPSEGSAPGTSESATPESGPGTSTEPSEGSAPGTSESATPESGPGSEPATSGSETPGTSTEPSEGSAPGTSTEPSEGSAPGTSESATPESGPGTSESATPESGPGSPAGSPTSTEEGTSESATPESGPGSEPATSGSETPGTSESATPESGPGTSTEPSEGSAPGTSTEPSEGSAPGTSTEPSEGSAPGTSTEPSEGSAPGTSTEPSEGSAPGTSTEPSEGSAPGSPAGSPTSTEEGTSTEPSEGSAPGTSESATPESGPGSEPATSGSETPGTSESATPESGPGSEPATSGSETPGTSESATPESGPGTSTEPSEGSAPGTSESATPESGPGSPAGSPTSTEEGSPAGSPTSTEEGSPAGSPTSTEEGTSESATPESGPGTSTEPSEGSAPGHAEGTFTSDVSSYLEGQAALEFIAWLVKGR

SEQ ID NO: 2038 - protein, 648 aa, Artificial Sequence
  Description of Artificial Sequence: Synthetic polypeptide
HDEFERHAEGTFTSDVSSTLEGQAALEFIAWLVKGRGGGSPAGSPTSTEEGTSESATPESGPGTSTEPSEGSAPGSPAGSPTSTEEGTSTEPSEGSAPGTSTEPSEGSAPGTSESATPESGPGSEPATSGSETPGSEPATSGSETPGSPAGSPTSTEEGTSESATPESGPGTSTEPSEGSAPGTSTEPSEGSAPGSPAGSPTSTEEGTSTEPSEGSAPGTSTEPSEGSAPGTSESATPESGPGTSTEPSEGSAPGTSESATPESGPGSEPATSGSETPGTSTEPSEGSAPGTSTEPSEGSAPGTSESATPESGPGTSESATPESGPGSPAGSPTSTEEGTSESATPESGPGSEPATSGSETPGTSESATPESGPGTSTEPSEGSAPGTSTEPSEGSAPGTSTEPSEGSAPGTSTEPSEGSAPGTSTEPSEGSAPGTSTEPSEGSAPGSPAGSPTSTEEGTSTEPSEGSAPGTSESATPESGPGSEPATSGSETPGTSESATPESGPGSEPATSGSETPGTSESATPESGPGTSTEPSEGSAPGTSESATPESGPGSPAGSPTSTEEGSPAGSPTSTEEGSPAGSPTSTEEGTSESATPESGPGTSTEPSEGSAPGHADGSFSDEMNTILDNLAARDFINWLIETKITD

SEQ ID NO: 2039 - protein, 685 aa, Artificial Sequence
  Description of Artificial Sequence: Synthetic polypeptide
HDEFERHAEGTFTSDVSSTLEGQAALEFIAWLVKGRGGGSPAGSPTSTEEGTSESATPESGPGTSTEPSEGSAPGSPAGSPTSTEEGTSTEPSEGSAPGTSTEPSEGSAPGTSESATPESGPGSEPATSGSETPGSEPATSGSETPGSPAGSPTSTEEGTSESATPESGPGTSTEPSEGSAPGTSTEPSEGSAPGSPAGSPTSTEEGTSTEPSEGSAPGTSTEPSEGSAPGTSESATPESGPGTSTEPSEGSAPGTSESATPESGPGSEPATSGSETPGTSTEPSEGSAPGTSTEPSEGSAPGTSESATPESGPGTSESATPESGPGSPAGSPTSTEEGTSESATPESGPGSEPATSGSETPGTSESATPESGPGTSTEPSEGSAPGTSTEPSEGSAPGTSTEPSEGSAPGTSTEPSEGSAPGTSTEPSEGSAPGTSTEPSEGSAPGSPAGSPTSTEEGTSTEPSEGSAPGTSESATPESGPGSEPATSGSETPGTSESATPESGPGSEPATSGSETPGTSESATPESGPGTSTEPSEGSAPGTSESATPESGPGSPAGSPTSTEEGSPAGSPTSTEEGSPAGSPTSTEEGTSESATPESGPGTSTEPSEGSAPGGPETLCGAELVDALQFVCGDRGFYFNKPTGYGSSSRRAPQTGIVDECCFRSCDLRRLEMYCAPLKPAKSA

SEQ ID NO: 2040 - protein, 682 aa, Artificial Sequence
  Description of Artificial Sequence: Synthetic polypeptide
HDEFERHAEGTFTSDVSSTLEGQAALEFIAWLVKGRGGGSPAGSPTSTEEGTSESATPESGPGTSTEPSEGSAPGSPAGSPTSTEEGTSTEPSEGSAPGTSTEPSEGSAPGTSESATPESGPGSEPATSGSETPGSEPATSGSETPGSPAGSPTSTEEGTSESATPESGPGTSTEPSEGSAPGTSTEPSEGSAPGSPAGSPTSTEEGTSTEPSEGSAPGTSTEPSEGSAPGTSESATPESGPGTSTEPSEGSAPGTSESATPESGPGSEPATSGSETPGTSTEPSEGSAPGTSTEPSEGSAPGTSESATPESGPGTSESATPESGPGSPAGSPTSTEEGTSESATPESGPGSEPATSGSETPGTSESATPESGPGTSTEPSEGSAPGTSTEPSEGSAPGTSTEPSEGSAPGTSTEPSEGSAPGTSTEPSEGSAPGTSTEPSEGSAPGSPAGSPTSTEEGTSTEPSEGSAPGTSESATPESGPGSEPATSGSETPGTSESATPESGPGSEPATSGSETPGTSESATPESGPGTSTEPSEGSAPGTSESATPESGPGSPAGSPTSTEEGSPAGSPTSTEEGSPAGSPTSTEEGTSESATPESGPGTSTEPSEGSAPGAYRPSETLCGGELVDTLQFVCGDRGFYFSRPASRVSRRSRGIVEECCFRSCDLALLETYCATPAKSE

SEQ ID NO: 2041 - protein, 764 aa, Artificial Sequence
  Description of Artificial Sequence: Synthetic polypeptide
HDEFERHAEGTFTSDVSSTLEGQAALEFIAWLVKGRGGGSPAGSPTSTEEGTSESATPESGPGTSTEPSEGSAPGSPAGSPTSTEEGTSTEPSEGSAPGTSTEPSEGSAPGTSESATPESGPGSEPATSGSETPGSEPATSGSETPGSPAGSPTSTEEGTSESATPESGPGTSTEPSEGSAPGTSTEPSEGSAPGSPAGSPTSTEEGTSTEPSEGSAPGTSTEPSEGSAPGTSESATPESGPGTSTEPSEGSAPGTSESATPESGPGSEPATSGSETPGTSTEPSEGSAPGTSTEPSEGSAPGTSESATPESGPGTSESATPESGPGSPAGSPTSTEEGTSESATPESGPGSEPATSGSETPGTSESATPESGPGTSTEPSEGSAPGTSTEPSEGSAPGTSTEPSEGSAPGTSTEPSEGSAPGTSTEPSEGSAPGTSTEPSEGSAPGSPAGSPTSTEEGTSTEPSEGSAPGTSESATPESGPGSEPATSGSETPGTSESATPESGPGSEPATSGSETPGTSESATPESGPGTSTEPSEGSAPGTSESATPESGPGSPAGSPTSTEEGSPAGSPTSTEEGSPAGSPTSTEEGTSESATPESGPGTSTEPSEGSAPGEESQKKLPSSRITCPQGSVAYGSYCYSLILIPQTWSNAELSCQMHFSGHLAFLLSTGEITFVSSLVKNSLTAYQYIWIGLHDPSHGTLPNGSGWKWSSSNVLTFYNWERNPSIAADRGYCAVLSQKSGFQKWRDFNCENELPYICKFKV

SEQ ID NO: 2042 - protein, 662 aa, Artificial Sequence; identical to SEQ ID NO: 1960
  Description of Artificial Sequence: Synthetic polypeptide

SEQ ID NO: 2043 - protein, 761 aa, Artificial Sequence
  Description of Artificial Sequence: Synthetic polypeptide
HDEFERHAEGTFTSDVSSTLEGQAALEFIAWLVKGRGGGSPAGSPTSTEEGTSESATPESGPGTSTEPSEGSAPGSPAGSPTSTEEGTSTEPSEGSAPGTSTEPSEGSAPGTSESATPESGPGSEPATSGSETPGSEPATSGSETPGSPAGSPTSTEEGTSESATPESGPGTSTEPSEGSAPGTSTEPSEGSAPGSPAGSPTSTEEGTSTEPSEGSAPGTSTEPSEGSAPGTSESATPESGPGTSTEPSEGSAPGTSESATPESGPGSEPATSGSETPGTSTEPSEGSAPGTSTEPSEGSAPGTSESATPESGPGTSESATPESGPGSPAGSPTSTEEGTSESATPESGPGSEPATSGSETPGTSESATPESGPGTSTEPSEGSAPGTSTEPSEGSAPGTSTEPSEGSAPGTSTEPSEGSAPGTSTEPSEGSAPGTSTEPSEGSAPGSPAGSPTSTEEGTSTEPSEGSAPGTSESATPESGPGSEPATSGSETPGTSESATPESGPGSEPATSGSETPGTSESATPESGPGTSTEPSEGSAPGTSESATPESGPGSPAGSPTSTEEGSPAGSPTSTEEGSPAGSPTSTEEGTSESATPESGPGTSTEPSEGSAPGVPIQKVQDDTKTLIKTIVTRINDISHTQSVSSKQKVTGLDFIPGLHPILTLSKMDQTLAVYQQILTSMPSRNVIQISNDLENLRDLLHVLAFSKSCHLPWASGLETLDSLGGVLEASGYSTEVVALSRLQGSLQDMLWQLDLSPGC

SEQ ID NO: 2044 - protein, 640 aa, Artificial Sequence
  Description of Artificial Sequence: Synthetic polypeptide
HDEFERHAEGTFTSDVSSTLEGQAALEFIAWLVKGRGGGSPAGSPTSTEEGTSESATPESGPGTSTEPSEGSAPGSPAGSPTSTEEGTSTEPSEGSAPGTSTEPSEGSAPGTSESATPESGPGSEPATSGSETPGSEPATSGSETPGSPAGSPTSTEEGTSESATPESGPGTSTEPSEGSAPGTSTEPSEGSAPGSPAGSPTSTEEGTSTEPSEGSAPGTSTEPSEGSAPGTSESATPESGPGTSTEPSEGSAPGTSESATPESGPGSEPATSGSETPGTSTEPSEGSAPGTSTEPSEGSAPGTSESATPESGPGTSESATPESGPGSPAGSPTSTEEGTSESATPESGPGSEPATSGSETPGTSESATPESGPGTSTEPSEGSAPGTSTEPSEGSAPGTSTEPSEGSAPGTSTEPSEGSAPGTSTEPSEGSAPGTSTEPSEGSAPGSPAGSPTSTEEGTSTEPSEGSAPGTSESATPESGPGSEPATSGSETPGTSESATPESGPGSEPATSGSETPGTSESATPESGPGTSTEPSEGSAPGTSESATPESGPGSPAGSPTSTEEGSPAGSPTSTEEGSPAGSPTSTEEGTSESATPESGPGTSTEPSEGSAPGFRVDEEFQSPFASQSRGYFLFRPRN

SEQ ID NO: 2045 - protein, 652 aa, Artificial Sequence
  Description of Artificial Sequence: Synthetic polypeptide
HDEFERHAEGTFTSDVSSTLEGQAALEFIAWLVKGRGGGSPAGSPTSTEEGTSESATPESGPGTSTEPSEGSAPGSPAGSPTSTEEGTSTEPSEGSAPGTSTEPSEGSAPGTSESATPESGPGSEPATSGSETPGSEPATSGSETPGSPAGSPTSTEEGTSESATPESGPGTSTEPSEGSAPGTSTEPSEGSAPGSPAGSPTSTEEGTSTEPSEGSAPGTSTEPSEGSAPGTSESATPESGPGTSTEPSEGSAPGTSESATPESGPGSEPATSGSETPGTSTEPSEGSAPGTSTEPSEGSAPGTSESATPESGPGTSESATPESGPGSPAGSPTSTEEGTSESATPESGPGSEPATSGSETPGTSESATPESGPGTSTEPSEGSAPGTSTEPSEGSAPGTSTEPSEGSAPGTSTEPSEGSAPGTSTEPSEGSAPGTSTEPSEGSAPGSPAGSPTSTEEGTSTEPSEGSAPGTSESATPESGPGSEPATSGSETPGTSESATPESGPGSEPATSGSETPGTSESATPESGPGTSTEPSEGSAPGTSESATPESGPGSPAGSPTSTEEGSPAGSPTSTEEGSPAGSPTSTEEGTSESATPESGPGTSTEPSEGSAPGHSQGTFTSDYSKYLDSRRAQDFVQWLMNTKRNRNNIA

SEQ ID NO: 2046 - protein, 652 aa, Artificial Sequence
  Description of Artificial Sequence: Synthetic polypeptide
HDEFERHAEGTFTSDVSSTLEGQAALEFIAWLVKGRGGGSPAGSPTSTEEGTSESATPESGPGTSTEPSEGSAPGSPAGSPTSTEEGTSTEPSEGSAPGTSTEPSEGSAPGTSESATPESGPGSEPATSGSETPGSEPATSGSETPGSPAGSPTSTEEGTSESATPESGPGTSTEPSEGSAPGTSTEPSEGSAPGSPAGSPTSTEEGTSTEPSEGSAPGTSTEPSEGSAPGTSESATPESGPGTSTEPSEGSAPGTSESATPESGPGSEPATSGSETPGTSTEPSEGSAPGTSTEPSEGSAPGTSESATPESGPGTSESATPESGPGSPAGSPTSTEEGTSESATPESGPGSEPATSGSETPGTSESATPESGPGTSTEPSEGSAPGTSTEPSEGSAPGTSTEPSEGSAPGTSTEPSEGSAPGTSTEPSEGSAPGTSTEPSEGSAPGSPAGSPTSTEEGTSTEPSEGSAPGTSESATPESGPGSEPATSGSETPGTSESATPESGPGSEPATSGSETPGTSESATPESGPGTSTEPSEGSAPGTSESATPESGPGSPAGSPTSTEEGSPAGSPTSTEEGSPAGSPTSTEEGTSESATPESGPGTSTEPSEGSAPGKCNTATCATNRLANFLVHSSNNFGPILPPTNVGSNTY

SEQ ID NO: 2047 - protein, 651 aa, Artificial Sequence
  Description of Artificial Sequence: Synthetic polypeptide
HDEFERHAEGTFTSDVSSTLEGQAALEFIAWLVKGRGGGSPAGSPTSTEEGTSESATPESGPGTSTEPSEGSAPGSPAGSPTSTEEGTSTEPSEGSAPGTSTEPSEGSAPGTSESATPESGPGSEPATSGSETPGSEPATSGSETPGSPAGSPTSTEEGTSESATPESGPGTSTEPSEGSAPGTSTEPSEGSAPGSPAGSPTSTEEGTSTEPSEGSAPGTSTEPSEGSAPGTSESATPESGPGTSTEPSEGSAPGTSESATPESGPGSEPATSGSETPGTSTEPSEGSAPGTSTEPSEGSAPGTSESATPESGPGTSESATPESGPGSPAGSPTSTEEGTSESATPESGPGSEPATSGSETPGTSESATPESGPGTSTEPSEGSAPGTSTEPSEGSAPGTSTEPSEGSAPGTSTEPSEGSAPGTSTEPSEGSAPGTSTEPSEGSAPGSPAGSPTSTEEGTSTEPSEGSAPGTSESATPESGPGSEPATSGSETPGTSESATPESGPGSEPATSGSETPGTSESATPESGPGTSTEPSEGSAPGTSESATPESGPGSPAGSPTSTEEGSPAGSPTSTEEGSPAGSPTSTEEGTSESATPESGPGTSTEPSEGSAPGYPIKPEAPGEDASPEELNRYYASLRHYLNLVTRQRY

SEQ ID NO: 2048 - protein, 656 aa, Artificial Sequence
  Description of Artificial Sequence: Synthetic polypeptide
HDEFERHAEGTFTSDVSSTLEGQAALEFIAWLVKGRGGGSPAGSPTSTEEGTSESATPESGPGTSTEPSEGSAPGSPAGSPTSTEEGTSTEPSEGSAPGTSTEPSEGSAPGTSESATPESGPGSEPATSGSETPGSEPATSGSETPGSPAGSPTSTEEGTSESATPESGPGTSTEPSEGSAPGTSTEPSEGSAPGSPAGSPTSTEEGTSTEPSEGSAPGTSTEPSEGSAPGTSESATPESGPGTSTEPSEGSAPGTSESATPESGPGSEPATSGSETPGTSTEPSEGSAPGTSTEPSEGSAPGTSESATPESGPGTSESATPESGPGSPAGSPTSTEEGTSESATPESGPGSEPATSGSETPGTSESATPESGPGTSTEPSEGSAPGTSTEPSEGSAPGTSTEPSEGSAPGTSTEPSEGSAPGTSTEPSEGSAPGTSTEPSEGSAPGSPAGSPTSTEEGTSTEPSEGSAPGTSESATPESGPGSEPATSGSETPGTSESATPESGPGSEPATSGSETPGTSESATPESGPGTSTEPSEGSAPGTSESATPESGPGSPAGSPTSTEEGSPAGSPTSTEEGSPAGSPTSTEEGTSESATPESGPGTSTEPSEGSAPGIVLSLDVPIGLLQILLEQARARAAREQATTNARILARVGHC

SEQ ID NO: 2049 - protein, 653 aa, Artificial Sequence
  Description of Artificial Sequence: Synthetic polypeptide
HDEFERHAEGTFTSDVSSTLEGQAALEFIAWLVKGRGGGSPAGSPTSTEEGTSESATPESGPGTSTEPSEGSAPGSPAGSPTSTEEGTSTEPSEGSAPGTSTEPSEGSAPGTSESATPESGPGSEPATSGSETPGSEPATSGSETPGSPAGSPTSTEEGTSESATPESGPGTSTEPSEGSAPGTSTEPSEGSAPGSPAGSPTSTEEGTSTEPSEGSAPGTSTEPSEGSAPGTSESATPESGPGTSTEPSEGSAPGTSESATPESGPGSEPATSGSETPGTSTEPSEGSAPGTSTEPSEGSAPGTSESATPESGPGTSESATPESGPGSPAGSPTSTEEGTSESATPESGPGSEPATSGSETPGTSESATPESGPGTSTEPSEGSAPGTSTEPSEGSAPGTSTEPSEGSAPGTSTEPSEGSAPGTSTEPSEGSAPGTSTEPSEGSAPGSPAGSPTSTEEGTSTEPSEGSAPGTSESATPESGPGSEPATSGSETPGTSESATPESGPGSEPATSGSETPGTSESATPESGPGTSTEPSEGSAPGTSESATPESGPGSPAGSPTSTEEGSPAGSPTSTEEGSPAGSPTSTEEGTSESATPESGPGTSTEPSEGSAPGFTLSLDVPTNIMNLLFNIAKAKNLRAQAAANAHLMAQI

SEQ ID NO: 2050 - protein, 645 aa, Artificial Sequence
  Description of Artificial Sequence: Synthetic polypeptide
HAEGTFTSDVSSYLEGQAALEFIAWLVKGRGGSPAGSPTSTEEGTSESATPESGPGTSTEPSEGSAPGSPAGSPTSTEEGTSTEPSEGSAPGTSTEPSEGSAPGTSESATPESGPGSEPATSGSETPGSEPATSGSETPGSPAGSPTSTEEGTSESATPESGPGTSTEPSEGSAPGTSTEPSEGSAPGSPAGSPTSTEEGTSTEPSEGSAPGTSTEPSEGSAPGTSESATPESGPGTSTEPSEGSAPGTSESATPESGPGSEPATSGSETPGTSTEPSEGSAPGTSTEPSEGSAPGTSESATPESGPGTSESATPESGPGSPAGSPTSTEEGTSESATPESGPGSEPATSGSETPGTSESATPESGPGTSTEPSEGSAPGTSTEPSEGSAPGTSTEPSEGSAPGTSTEPSEGSAPGTSTEPSEGSAPGTSTEPSEGSAPGSPAGSPTSTEEGTSTEPSEGSAPGTSESATPESGPGSEPATSGSETPGTSESATPESGPGSEPATSGSETPGTSESATPESGPGTSTEPSEGSAPGTSESATPESGPGSPAGSPTSTEEGSPAGSPTSTEEGSPAGSPTSTEEGTSESATPESGPGTSTEPSEGSAPGHDEFERHAEGTFTSDVSSTLEGQAALEFIAWLVKGRG

SEQ ID NO: 2051 - protein, 648 aa, Artificial Sequence
  Description of Artificial Sequence: Synthetic polypeptide
HADGSFSDEMNTILDNLAARDFINWLIETKITDGGSPAGSPTSTEEGTSESATPESGPGTSTEPSEGSAPGSPAGSPTSTEEGTSTEPSEGSAPGTSTEPSEGSAPGTSESATPESGPGSEPATSGSETPGSEPATSGSETPGSPAGSPTSTEEGTSESATPESGPGTSTEPSEGSAPGTSTEPSEGSAPGSPAGSPTSTEEGTSTEPSEGSAPGTSTEPSEGSAPGTSESATPESGPGTSTEPSEGSAPGTSESATPESGPGSEPATSGSETPGTSTEPSEGSAPGTSTEPSEGSAPGTSESATPESGPGTSESATPESGPGSPAGSPTSTEEGTSESATPESGPGSEPATSGSETPGTSESATPESGPGTSTEPSEGSAPGTSTEPSEGSAPGTSTEPSEGSAPGTSTEPSEGSAPGTSTEPSEGSAPGTSTEPSEGSAPGSPAGSPTSTEEGTSTEPSEGSAPGTSESATPESGPGSEPATSGSETPGTSESATPESGPGSEPATSGSETPGTSESATPESGPGTSTEPSEGSAPGTSESATPESGPGSPAGSPTSTEEGSPAGSPTSTEEGSPAGSPTSTEEGTSESATPESGPGTSTEPSEGSAPGHDEFERHAEGTFTSDVSSTLEGQAALEFIAWLVKGRG

SEQ ID NO: 2052 - protein, 685 aa, Artificial Sequence
  Description of Artificial Sequence: Synthetic polypeptide
GPETLCGAELVDALQFVCGDRGFYFNKPTGYGSSSRRAPQTGIVDECCFRSCDLRRLEMYCAPLKPAKSAGGSPAGSPTSTEEGTSESATPESGPGTSTEPSEGSAPGSPAGSPTSTEEGTSTEPSEGSAPGTSTEPSEGSAPGTSESATPESGPGSEPATSGSETPGSEPATSGSETPGSPAGSPTSTEEGTSESATPESGPGTSTEPSEGSAPGTSTEPSEGSAPGSPAGSPTSTEEGTSTEPSEGSAPGTSTEPSEGSAPGTSESATPESGPGTSTEPSEGSAPGTSESATPESGPGSEPATSGSETPGTSTEPSEGSAPGTSTEPSEGSAPGTSESATPESGPGTSESATPESGPGSPAGSPTSTEEGTSESATPESGPGSEPATSGSETPGTSESATPESGPGTSTEPSEGSAPGTSTEPSEGSAPGTSTEPSEGSAPGTSTEPSEGSAPGTSTEPSEGSAPGTSTEPSEGSAPGSPAGSPTSTEEGTSTEPSEGSAPGTSESATPESGPGSEPATSGSETPGTSESATPESGPGSEPATSGSETPGTSESATPESGPGTSTEPSEGSAPGTSESATPESGPGSPAGSPTSTEEGSPAGSPTSTEEGSPAGSPTSTEEGTSESATPESGPGTSTEPSEGSAPGHDEFERHAEGTFTSDVSSTLEGQAALEFIAWLVKGRG

SEQ ID NO: 2053 - protein, 682 aa, Artificial Sequence
  Description of Artificial Sequence: Synthetic polypeptide
AYRPSETLCGGELVDTLQFVCGDRGFYFSRPASRVSRRSRGIVEECCFRSCDLALLETYCATPAKSEGGSPAGSPTSTEEGTSESATPESGPGTSTEPSEGSAPGSPAGSPTSTEEGTSTEPSEGSAPGTSTEPSEGSAPGTSESATPESGPGSEPATSGSETPGSEPATSGSETPGSPAGSPTSTEEGTSESATPESGPGTSTEPSEGSAPGTSTEPSEGSAPGSPAGSPTSTEEGTSTEPSEGSAPGTSTEPSEGSAPGTSESATPESGPGTSTEPSEGSAPGTSESATPESGPGSEPATSGSETPGTSTEPSEGSAPGTSTEPSEGSAPGTSESATPESGPGTSESATPESGPGSPAGSPTSTEEGTSESATPESGPGSEPATSGSETPGTSESATPESGPGTSTEPSEGSAPGTSTEPSEGSAPGTSTEPSEGSAPGTSTEPSEGSAPGTSTEPSEGSAPGTSTEPSEGSAPGSPAGSPTSTEEGTSTEPSEGSAPGTSESATPESGPGSEPATSGSETPGTSESATPESGPGSEPATSGSETPGTSESATPESGPGTSTEPSEGSAPGTSESATPESGPGSPAGSPTSTEEGSPAGSPTSTEEGSPAGSPTSTEEGTSESATPESGPGTSTEPSEGSAPGHDEFERHAEGTFTSDVSSTLEGQAALEFIAWLVKGRG

SEQ ID NO: 2054 - protein, 764 aa, Artificial Sequence
  Description of Artificial Sequence: Synthetic polypeptide
EESQKKLPSSRITCPQGSVAYGSYCYSLILIPQTWSNAELSCQMHFSGHLAFLLSTGEITFVSSLVKNSLTAYQYIWIGLHDPSHGTLPNGSGWKWSSSNVLTFYNWERNPSIAADRGYCAVLSQKSGFQKWRDFNCENELPYICKFKVGGSPAGSPTSTEEGTSESATPESGPGTSTEPSEGSAPGSPAGSPTSTEEGTSTEPSEGSAPGTSTEPSEGSAPGTSESATPESGPGSEPATSGSETPGSEPATSGSETPGSPAGSPTSTEEGTSESATPESGPGTSTEPSEGSAPGTSTEPSEGSAPGSPAGSPTSTEEGTSTEPSEGSAPGTSTEPSEGSAPGTSESATPESGPGTSTEPSEGSAPGTSESATPESGPGSEPATSGSETPGTSTEPSEGSAPGTSTEPSEGSAPGTSESATPESGPGTSESATPESGPGSPAGSPTSTEEGTSESATPESGPGSEPATSGSETPGTSESATPESGPGTSTEPSEGSAPGTSTEPSEGSAPGTSTEPSEGSAPGTSTEPSEGSAPGTSTEPSEGSAPGTSTEPSEGSAPGSPAGSPTSTEEGTSTEPSEGSAPGTSESATPESGPGSEPATSGSETPGTSESATPESGPGSEPATSGSETPGTSESATPESGPGTSTEPSEGSAPGTSESATPESGPGSPAGSPTSTEEGSPAGSPTSTEEGSPAGSPTSTEEGTSESATPESGPGTSTEPSEGSAPGHDEFERHAEGTFTSDVSSTLEGQAALEFIAWLVKGRG

SEQ ID NO: 2055 - protein, 662 aa, Artificial Sequence
  Description of Artificial Sequence: Synthetic polypeptide
TQAQLLRVGCVLGTCQVQNLSHRLWQLMGPAGRQDSAPVDPSSPHSYGGSPAGSPTSTEEGTSESATPESGPGTSTEPSEGSAPGSPAGSPTSTEEGTSTEPSEGSAPGTSTEPSEGSAPGTSESATPESGPGSEPATSGSETPGSEPATSGSETPGSPAGSPTSTEEGTSESATPESGPGTSTEPSEGSAPGTSTEPSEGSAPGSPAGSPTSTEEGTSTEPSEGSAPGTSTEPSEGSAPGTSESATPESGPGTSTEPSEGSAPGTSESATPESGPGSEPATSGSETPGTSTEPSEGSAPGTSTEPSEGSAPGTSESATPESGPGTSESATPESGPGSPAGSPTSTEEGTSESATPESGPGSEPATSGSETPGTSESATPESGPGTSTEPSEGSAPGTSTEPSEGSAPGTSTEPSEGSAPGTSTEPSEGSAPGTSTEPSEGSAPGTSTEPSEGSAPGSPAGSPTSTEEGTSTEPSEGSAPGTSESATPESGPGSEPATSGSETPGTSESATPESGPGSEPATSGSETPGTSESATPESGPGTSTEPSEGSAPGTSESATPESGPGSPAGSPTSTEEGSPAGSPTSTEEGSPAGSPTSTEEGTSESATPESGPGTSTEPSEGSAPGHDEFERHAEGTFTSDVSSTLEGQAALEFIAWLVKGRG

SEQ ID NO: 2056 - protein, 761 aa, Artificial Sequence
  Description of Artificial Sequence: Synthetic polypeptide
VPIQKVQDDTKTLIKTIVTRINDISHTQSVSSKQKVTGLDFIPGLHPILTLSKMDQTLAVYQQILTSMPSRNVIQISNDLENLRDLLHVLAFSKSCHLPWASGLETLDSLGGVLEASGYSTEVVALSRLQGSLQDMLWQLDLSPGCGGSPAGSPTSTEEGTSESATPESGPGTSTEPSEGSAPGSPAGSPTSTEEGTSTEPSEGSAPGTSTEPSEGSAPGTSESATPESGPGSEPATSGSETPGSEPATSGSETPGSPAGSPTSTEEGTSESATPESGPGTSTEPSEGSAPGTSTEPSEGSAPGSPAGSPTSTEEGTSTEPSEGSAPGTSTEPSEGSAPGTSESATPESGPGTSTEPSEGSAPGTSESATPESGPGSEPATSGSETPGTSTEPSEGSAPGTSTEPSEGSAPGTSESATPESGPGTSESATPESGPGSPAGSPTSTEEGTSESATPESGPGSEPATSGSETPGTSESATPESGPGTSTEPSEGSAPGTSTEPSEGSAPGTSTEPSEGSAPGTSTEPSEGSAPGTSTEPSEGSAPGTSTEPSEGSAPGSPAGSPTSTEEGTSTEPSEGSAPGTSESATPESGPGSEPATSGSETPGTSESATPESGPGSEPATSGSETPGTSESATPESGPGTSTEPSEGSAPGTSESATPESGPGSPAGSPTSTEEGSPAGSPTSTEEGSPAGSPTSTEEGTSESATPESGPGTSTEPSEGSAPGHDEFERHAEGTFTSDVSSTLEGQAALEFIAWLVKGRG

SEQ ID NO: 2057 - protein, 640 aa, Artificial Sequence
  Description of Artificial Sequence: Synthetic polypeptide
FRVDEEFQSPFASQSRGYFLFRPRNGGSPAGSPTSTEEGTSESATPESGPGTSTEPSEGSAPGSPAGSPTSTEEGTSTEPSEGSAPGTSTEPSEGSAPGTSESATPESGPGSEPATSGSETPGSEPATSGSETPGSPAGSPTSTEEGTSESATPESGPGTSTEPSEGSAPGTSTEPSEGSAPGSPAGSPTSTEEGTSTEPSEGSAPGTSTEPSEGSAPGTSESATPESGPGTSTEPSEGSAPGTSESATPESGPGSEPATSGSETPGTSTEPSEGSAPGTSTEPSEGSAPGTSESATPESGPGTSESATPESGPGSPAGSPTSTEEGTSESATPESGPGSEPATSGSETPGTSESATPESGPGTSTEPSEGSAPGTSTEPSEGSAPGTSTEPSEGSAPGTSTEPSEGSAPGTSTEPSEGSAPGTSTEPSEGSAPGSPAGSPTSTEEGTSTEPSEGSAPGTSESATPESGPGSEPATSGSETPGTSESATPESGPGSEPATSGSETPGTSESATPESGPGTSTEPSEGSAPGTSESATPESGPGSPAGSPTSTEEGSPAGSPTSTEEGSPAGSPTSTEEGTSESATPESGPGTSTEPSEGSAPGHDEFERHAEGTFTSDVSSTLEGQAALEFIAWLVKGRG

SEQ ID NO: 2058 - protein, 652 aa, Artificial Sequence
  Description of Artificial Sequence: Synthetic polypeptide
HSQGTFTSDYSKYLDSRRAQDFVQWLMNTKRNRNNIAGGSPAGSPTSTEEGTSESATPESGPGTSTEPSEGSAPGSPAGSPTSTEEGTSTEPSEGSAPGTSTEPSEGSAPGTSESATPESGPGSEPATSGSETPGSEPATSGSETPGSPAGSPTSTEEGTSESATPESGPGTSTEPSEGSAPGTSTEPSEGSAPGSPAGSPTSTEEGTSTEPSEGSAPGTSTEPSEGSAPGTSESATPESGPGTSTEPSEGSAPGTSESATPESGPGSEPATSGSETPGTSTEPSEGSAPGTSTEPSEGSAPGTSESATPESGPGTSESATPESGPGSPAGSPTSTEEGTSESATPESGPGSEPATSGSETPGTSESATPESGPGTSTEPSEGSAPGTSTEPSEGSAPGTSTEPSEGSAPGTSTEPSEGSAPGTSTEPSEGSAPGTSTEPSEGSAPGSPAGSPTSTEEGTSTEPSEGSAPGTSESATPESGPGSEPATSGSETPGTSESATPESGPGSEPATSGSETPGTSESATPESGPGTSTEPSEGSAPGTSESATPESGPGSPAGSPTSTEEGSPAGSPTSTEEGSPAGSPTSTEEGTSESATPESGPGTSTEPSEGSAPGHDEFERHAEGTFTSDVSSTLEGQAALEFIAWLVKGRG

SEQ ID NO: 2059 - protein, 652 aa, Artificial Sequence
  Description of Artificial Sequence: Synthetic polypeptide
KCNTATCATNRLANFLVHSSNNFGPILPPTNVGSNTYGGSPAGSPTSTEEGTSESATPESGPGTSTEPSEGSAPGSPAGSPTSTEEGTSTEPSEGSAPGTSTEPSEGSAPGTSESATPESGPGSEPATSGSETPGSEPATSGSETPGSPAGSPTSTEEGTSESATPESGPGTSTEPSEGSAPGTSTEPSEGSAPGSPAGSPTSTEEGTSTEPSEGSAPGTSTEPSEGSAPGTSESATPESGPGTSTEPSEGSAPGTSESATPESGPGSEPATSGSETPGTSTEPSEGSAPGTSTEPSEGSAPGTSESATPESGPGTSESATPESGPGSPAGSPTSTEEGTSESATPESGPGSEPATSGSETPGTSESATPESGPGTSTEPSEGSAPGTSTEPSEGSAPGTSTEPSEGSAPGTSTEPSEGSAPGTSTEPSEGSAPGTSTEPSEGSAPGSPAGSPTSTEEGTSTEPSEGSAPGTSESATPESGPGSEPATSGSETPGTSESATPESGPGSEPATSGSETPGTSESATPESGPGTSTEPSEGSAPGTSESATPESGPGSPAGSPTSTEEGSPAGSPTSTEEGSPAGSPTSTEEGTSESATPESGPGTSTEPSEGSAPGHDEFERHAEGTFTSDVSSTLEGQAALEFIAWLVKGRG

SEQ ID NO: 2060 - protein, 651 aa, Artificial Sequence
  Description of Artificial Sequence: Synthetic polypeptide
YPIKPEAPGEDASPEELNRYYASLRHYLNLVTRQRYGGSPAGSPTSTEEGTSESATPESGPGTSTEPSEGSAPGSPAGSPTSTEEGTSTEPSEGSAPGTSTEPSEGSAPGTSESATPESGPGSEPATSGSETPGSEPATSGSETPGSPAGSPTSTEEGTSESATPESGPGTSTEPSEGSAPGTSTEPSEGSAPGSPAGSPTSTEEGTSTEPSEGSAPGTSTEPSEGSAPGTSESATPESGPGTSTEPSEGSAPGTSESATPESGPGSEPATSGSETPGTSTEPSEGSAPGTSTEPSEGSAPGTSESATPESGPGTSESATPESGPGSPAGSPTSTEEGTSESATPESGPGSEPATSGSETPGTSESATPESGPGTSTEPSEGSAPGTSTEPSEGSAPGTSTEPSEGSAPGTSTEPSEGSAPGTSTEPSEGSAPGTSTEPSEGSAPGSPAGSPTSTEEGTSTEPSEGSAPGTSESATPESGPGSEPATSGSETPGTSESATPESGPGSEPATSGSETPGTSESATPESGPGTSTEPSEGSAPGTSESATPESGPGSPAGSPTSTEEGSPAGSPTSTEEGSPAGSPTSTEEGTSESATPESGPGTSTEPSEGSAPGHDEFERHAEGTFTSDVSSTLEGQAALEFIAWLVKGRG

SEQ ID NO: 2061 - protein, 656 aa, Artificial Sequence
  Description of Artificial Sequence: Synthetic polypeptide
IVLSLDVPIGLLQILLEQARARAAREQATTNARILARVGHCGGSPAGSPTSTEEGTSESATPESGPGTSTEPSEGSAPGSPAGSPTSTEEGTSTEPSEGSAPGTSTEPSEGSAPGTSESATPESGPGSEPATSGSETPGSEPATSGSETPGSPAGSPTSTEEGTSESATPESGPGTSTEPSEGSAPGTSTEPSEGSAPGSPAGSPTSTEEGTSTEPSEGSAPGTSTEPSEGSAPGTSESATPESGPGTSTEPSEGSAPGTSESATPESGPGSEPATSGSETPGTSTEPSEGSAPGTSTEPSEGSAPGTSESATPESGPGTSESATPESGPGSPAGSPTSTEEGTSESATPESGPGSEPATSGSETPGTSESATPESGPGTSTEPSEGSAPGTSTEPSEGSAPGTSTEPSEGSAPGTSTEPSEGSAPGTSTEPSEGSAPGTSTEPSEGSAPGSPAGSPTSTEEGTSTEPSEGSAPGTSESATPESGPGSEPATSGSETPGTSESATPESGPGSEPATSGSETPGTSESATPESGPGTSTEPSEGSAPGTSESATPESGPGSPAGSPTSTEEGSPAGSPTSTEEGSPAGSPTSTEEGTSESATPESGPGTSTEPSEGSAPGHDEFERHAEGTFTSDVSSTLEGQAALEFIAWLVKGRG

SEQ ID NO: 2062 - protein, 653 aa, Artificial Sequence
  Description of Artificial Sequence: Synthetic polypeptide
FTLSLDVPTNIMNLLFNIAKAKNLRAQAAANAHLMAQIGGSPAGSPTSTEEGTSESATPESGPGTSTEPSEGSAPGSPAGSPTSTEEGTSTEPSEGSAPGTSTEPSEGSAPGTSESATPESGPGSEPATSGSETPGSEPATSGSETPGSPAGSPTSTEEGTSESATPESGPGTSTEPSEGSAPGTSTEPSEGSAPGSPAGSPTSTEEGTSTEPSEGSAPGTSTEPSEGSAPGTSESATPESGPGTSTEPSEGSAPGTSESATPESGPGSEPATSGSETPGTSTEPSEGSAPGTSTEPSEGSAPGTSESATPESGPGTSESATPESGPGSPAGSPTSTEEGTSESATPESGPGSEPATSGSETPGTSESATPESGPGTSTEPSEGSAPGTSTEPSEGSAPGTSTEPSEGSAPGTSTEPSEGSAPGTSTEPSEGSAPGTSTEPSEGSAPGSPAGSPTSTEEGTSTEPSEGSAPGTSESATPESGPGSEPATSGSETPGTSESATPESGPGSEPATSGSETPGTSESATPESGPGTSTEPSEGSAPGTSESATPESGPGSPAGSPTSTEEGSPAGSPTSTEEGSPAGSPTSTEEGTSESATPESGPGTSTEPSEGSAPGHDEFERHAEGTFTSDVSSTLEGQAALEFIAWLVKGRG

SEQ ID NO: 2063 - protein, 681 aa, Artificial Sequence
  Description of Artificial Sequence: Synthetic polypeptide
HADGSFSDEMNTILDNLAARDFINWLIETKITDGGSPAGSPTSTEEGTSESATPESGPGTSTEPSEGSAPGSPAGSPTSTEEGTSTEPSEGSAPGTSTEPSEGSAPGTSESATPESGPGSEPATSGSETPGSEPATSGSETPGSPAGSPTSTEEGTSESATPESGPGTSTEPSEGSAPGTSTEPSEGSAPGSPAGSPTSTEEGTSTEPSEGSAPGTSTEPSEGSAPGTSESATPESGPGTSTEPSEGSAPGTSESATPESGPGSEPATSGSETPGTSTEPSEGSAPGTSTEPSEGSAPGTSESATPESGPGTSESATPESGPGSPAGSPTSTEEGTSESATPESGPGSEPATSGSETPGTSESATPESGPGTSTEPSEGSAPGTSTEPSEGSAPGTSTEPSEGSAPGTSTEPSEGSAPGTSTEPSEGSAPGTSTEPSEGSAPGSPAGSPTSTEEGTSTEPSEGSAPGTSESATPESGPGSEPATSGSETPGTSESATPESGPGSEPATSGSETPGTSESATPESGPGTSTEPSEGSAPGTSESATPESGPGSPAGSPTSTEEGSPAGSPTSTEEGSPAGSPTSTEEGTSESATPESGPGTSTEPSEGSAPGGPETLCGAELVDALQFVCGDRGFYFNKPTGYGSSSRRAPQTGIVDECCFRSCDLRRLEMYCAPLKPAKSA

SEQ ID NO: 2064 - protein, 678 aa, Artificial Sequence
  Description of Artificial Sequence: Synthetic polypeptide
HADGSFSDEMNTILDNLAARDFINWLIETKITDGGSPAGSPTSTEEGTSESATPESGPGTSTEPSEGSAPGSPAGSPTSTEEGTSTEPSEGSAPGTSTEPSEGSAPGTSESATPESGPGSEPATSGSETPGSEPATSGSETPGSPAGSPTSTEEGTSESATPESGPGTSTEPSEGSAPGTSTEPSEGSAPGSPAGSPTSTEEGTSTEPSEGSAPGTSTEPSEGSAPGTSESATPESGPGTSTEPSEGSAPGTSESATPESGPGSEPATSGSETPGTSTEPSEGSAPGTSTEPSEGSAPGTSESATPESGPGTSESATPESGPGSPAGSPTSTEEGTSESATPESGPGSEPATSGSETPGTSESATPESGPGTSTEPSEGSAPGTSTEPSEGSAPGTSTEPSEGSAPGTSTEPSEGSAPGTSTEPSEGSAPGTSTEPSEGSAPGSPAGSPTSTEEGTSTEPSEGSAPGTSESATPESGPGSEPATSGSETPGTSESATPESGPGSEPATSGSETPGTSESATPESGPGTSTEPSEGSAPGTSESATPESGPGSPAGSPTSTEEGSPAGSPTSTEEGSPAGSPTSTEEGTSESATPESGPGTSTEPSEGSAPGAYRPSETLCGGELVDTLQFVCGDRGFYFSRPASRVSRRSRGIVEECCFRSCDLALLETYCATPAKSE

SEQ ID NO: 2065 - protein, 760 aa, Artificial Sequence
  Description of Artificial Sequence: Synthetic polypeptide
HADGSFSDEMNTILDNLAARDFINWLIETKITDGGSPAGSPTSTEEGTSESATPESGPGTSTEPSEGSAPGSPAGSPTSTEEGTSTEPSEGSAPGTSTEPSEGSAPGTSESATPESGPGSEPATSGSETPGSEPATSGSETPGSPAGSPTSTEEGTSESATPESGPGTSTEPSEGSAPGTSTEPSEGSAPGSPAGSPTSTEEGTSTEPSEGSAPGTSTEPSEGSAPGTSESATPESGPGTSTEPSEGSAPGTSESATPESGPGSEPATSGSETPGTSTEPSEGSAPGTSTEPSEGSAPGTSESATPESGPGTSESATPESGPGSPAGSPTSTEEGTSESATPESGPGSEPATSGSETPGTSESATPESGPGTSTEPSEGSAPGTSTEPSEGSAPGTSTEPSEGSAPGTSTEPSEGSAPGTSTEPSEGSAPGTSTEPSEGSAPGSPAGSPTSTEEGTSTEPSEGSAPGTSESATPESGPGSEPATSGSETPGTSESATPESGPGSEPATSGSETPGTSESATPESGPGTSTEPSEGSAPGTSESATPESGPGSPAGSPTSTEEGSPAGSPTSTEEGSPAGSPTSTEEGTSESATPESGPGTSTEPSEGSAPGEESQKKLPSSRITCPQGSVAYGSYCYSLILIPQTWSNAELSCQMHFSGHLAFLLSTGEITFVSSLVKNSLTAYQYIWIGLHDPSHGTLPNGSGWKWSSSNVLTFYNWERNPSIAADRGYCAVLSQKSGFQKWRDFNCENELPYICKFKV

SEQ ID NO: 2066 - protein, 658 aa, Artificial Sequence; identical to SEQ ID NO: 1962
  Description of Artificial Sequence: Synthetic polypeptide

SEQ ID NO: 2067 - protein, 757 aa, Artificial Sequence
  Description of Artificial Sequence: Synthetic polypeptide
HADGSFSDEMNTILDNLAARDFINWLIETKITDGGSPAGSPTSTEEGTSESATPESGPGTSTEPSEGSAPGSPAGSPTSTEEGTSTEPSEGSAPGTSTEPSEGSAPGTSESATPESGPGSEPATSGSETPGSEPATSGSETPGSPAGSPTSTEEGTSESATPESGPGTSTEPSEGSAPGTSTEPSEGSAPGSPAGSPTSTEEGTSTEPSEGSAPGTSTEPSEGSAPGTSESATPESGPGTSTEPSEGSAPGTSESATPESGPGSEPATSGSETPGTSTEPSEGSAPGTSTEPSEGSAPGTSESATPESGPGTSESATPESGPGSPAGSPTSTEEGTSESATPESGPGSEPATSGSETPGTSESATPESGPGTSTEPSEGSAPGTSTEPSEGSAPGTSTEPSEGSAPGTSTEPSEGSAPGTSTEPSEGSAPGTSTEPSEGSAPGSPAGSPTSTEEGTSTEPSEGSAPGTSESATPESGPGSEPATSGSETPGTSESATPESGPGSEPATSGSETPGTSESATPESGPGTSTEPSEGSAPGTSESATPESGPGSPAGSPTSTEEGSPAGSPTSTEEGSPAGSPTSTEEGTSESATPESGPGTSTEPSEGSAPGVPIQKVQDDTKTLIKTIVTRINDISHTQSVSSKQKVTGLDFIPGLHPILTLSKMDQTLAVYQQILTSMPSRNVIQISNDLENLRDLLHVLAFSKSCHLPWASGLETLDSLGGVLEASGYSTEVVALSRLQGSLQDMLWQLDLSPGC

SEQ ID NO: 2068 - protein, 636 aa, Artificial Sequence
  Description of Artificial Sequence: Synthetic polypeptide
HADGSFSDEMNTILDNLAARDFINWLIETKITDGGSPAGSPTSTEEGTSESATPESGPGTSTEPSEGSAPGSPAGSPTSTEEGTSTEPSEGSAPGTSTEPSEGSAPGTSESATPESGPGSEPATSGSETPGSEPATSGSETPGSPAGSPTSTEEGTSESATPESGPGTSTEPSEGSAPGTSTEPSEGSAPGSPAGSPTSTEEGTSTEPSEGSAPGTSTEPSEGSAPGTSESATPESGPGTSTEPSEGSAPGTSESATPESGPGSEPATSGSETPGTSTEPSEGSAPGTSTEPSEGSAPGTSESATPESGPGTSESATPESGPGSPAGSPTSTEEGTSESATPESGPGSEPATSGSETPGTSESATPESGPGTSTEPSEGSAPGTSTEPSEGSAPGTSTEPSEGSAPGTSTEPSEGSAPGTSTEPSEGSAPGTSTEPSEGSAPGSPAGSPTSTEEGTSTEPSEGSAPGTSESATPESGPGSEPATSGSETPGTSESATPESGPGSEPATSGSETPGTSESATPESGPGTSTEPSEGSAPGTSESATPESGPGSPAGSPTSTEEGSPAGSPTSTEEGSPAGSPTSTEEGTSESATPESGPGTSTEPSEGSAPGFRVDEEFQSPFASQSRGYFLFRPRN

SEQ ID NO: 2069 - protein, 648 aa, Artificial Sequence
  Description of Artificial Sequence: Synthetic polypeptide
HADGSFSDEMNTILDNLAARDFINWLIETKITDGGSPAGSPTSTEEGTSESATPESGPGTSTEPSEGSAPGSPAGSPTSTEEGTSTEPSEGSAPGTSTEPSEGSAPGTSESATPESGPGSEPATSGSETPGSEPATSGSETPGSPAGSPTSTEEGTSESATPESGPGTSTEPSEGSAPGTSTEPSEGSAPGSPAGSPTSTEEGTSTEPSEGSAPGTSTEPSEGSAPGTSESATPESGPGTSTEPSEGSAPGTSESATPESGPGSEPATSGSETPGTSTEPSEGSAPGTSTEPSEGSAPGTSESATPESGPGTSESATPESGPGSPAGSPTSTEEGTSESATPESGPGSEPATSGSETPGTSESATPESGPGTSTEPSEGSAPGTSTEPSEGSAPGTSTEPSEGSAPGTSTEPSEGSAPGTSTEPSEGSAPGTSTEPSEGSAPGSPAGSPTSTEEGTSTEPSEGSAPGTSESATPESGPGSEPATSGSETPGTSESATPESGPGSEPATSGSETPGTSESATPESGPGTSTEPSEGSAPGTSESATPESGPGSPAGSPTSTEEGSPAGSPTSTEEGSPAGSPTSTEEGTSESATPESGPGTSTEPSEGSAPGHSQGTFTSDYSKYLDSRRAQDFVQWLMNTKRNRNNIA

SEQ ID NO: 2070 - protein, 648 aa, Artificial Sequence
  Description of Artificial Sequence: Synthetic polypeptide
HADGSFSDEMNTILDNLAARDFINWLIETKITDGGSPAGSPTSTEEGTSESATPESGPGTSTEPSEGSAPGSPAGSPTSTEEGTSTEPSEGSAPGTSTEPSEGSAPGTSESATPESGPGSEPATSGSETPGSEPATSGSETPGSPAGSPTSTEEGTSESATPESGPGTSTEPSEGSAPGTSTEPSEGSAPGSPAGSPTSTEEGTSTEPSEGSAPGTSTEPSEGSAPGTSESATPESGPGTSTEPSEGSAPGTSESATPESGPGSEPATSGSETPGTSTEPSEGSAPGTSTEPSEGSAPGTSESATPESGPGTSESATPESGPGSPAGSPTSTEEGTSESATPESGPGSEPATSGSETPGTSESATPESGPGTSTEPSEGSAPGTSTEPSEGSAPGTSTEPSEGSAPGTSTEPSEGSAPGTSTEPSEGSAPGTSTEPSEGSAPGSPAGSPTSTEEGTSTEPSEGSAPGTSESATPESGPGSEPATSGSETPGTSESATPESGPGSEPATSGSETPGTSESATPESGPGTSTEPSEGSAPGTSESATPESGPGSPAGSPTSTEEGSPAGSPTSTEEGSPAGSPTSTEEGTSESATPESGPGTSTEPSEGSAPGKCNTATCATNRLANFLVHSSNNFGPILPPTNVGSNTY

SEQ ID NO: 2071 - protein, 647 aa, Artificial Sequence
  Description of Artificial Sequence: Synthetic polypeptide
HADGSFSDEMNTILDNLAARDFINWLIETKITDGGSPAGSPTSTEEGTSESATPESGPGTSTEPSEGSAPGSPAGSPTSTEEGTSTEPSEGSAPGTSTEPSEGSAPGTSESATPESGPGSEPATSGSETPGSEPATSGSETPGSPAGSPTSTEEGTSESATPESGPGTSTEPSEGSAPGTSTEPSEGSAPGSPAGSPTSTEEGTSTEPSEGSAPGTSTEPSEGSAPGTSESATPESGPGTSTEPSEGSAPGTSESATPESGPGSEPATSGSETPGTSTEPSEGSAPGTSTEPSEGSAPGTSESATPESGPGTSESATPESGPGSPAGSPTSTEEGTSESATPESGPGSEPATSGSETPGTSESATPESGPGTSTEPSEGSAPGTSTEPSEGSAPGTSTEPSEGSAPGTSTEPSEGSAPGTSTEPSEGSAPGTSTEPSEGSAPGSPAGSPTSTEEGTSTEPSEGSAPGTSESATPESGPGSEPATSGSETPGTSESATPESGPGSEPATSGSETPGTSESATPESGPGTSTEPSEGSAPGTSESATPESGPGSPAGSPTSTEEGSPAGSPTSTEEGSPAGSPTSTEEGTSESATPESGPGTSTEPSEGSAPGYPIKPEAPGEDASPEELNRYYASLRHYLNLVTRQRY

SEQ ID NO: 2072 - protein, 652 aa, Artificial Sequence
  Description of Artificial Sequence: Synthetic polypeptide
HADGSFSDEMNTILDNLAARDFINWLIETKITDGGSPAGSPTSTEEGTSESATPESGPGTSTEPSEGSAPGSPAGSPTSTEEGTSTEPSEGSAPGTSTEPSEGSAPGTSESATPESGPGSEPATSGSETPGSEPATSGSETPGSPAGSPTSTEEGTSESATPESGPGTSTEPSEGSAPGTSTEPSEGSAPGSPAGSPTSTEEGTSTEPSEGSAPGTSTEPSEGSAPGTSESATPESGPGTSTEPSEGSAPGTSESATPESGPGSEPATSGSETPGTSTEPSEGSAPGTSTEPSEGSAPGTSESATPESGPGTSESATPESGPGSPAGSPTSTEEGTSESATPESGPGSEPATSGSETPGTSESATPESGPGTSTEPSEGSAPGTSTEPSEGSAPGTSTEPSEGSAPGTSTEPSEGSAPGTSTEPSEGSAPGTSTEPSEGSAPGSPAGSPTSTEEGTSTEPSEGSAPGTSESATPESGPGSEPATSGSETPGTSESATPESGPGSEPATSGSETPGTSESATPESGPGTSTEPSEGSAPGTSESATPESGPGSPAGSPTSTEEGSPAGSPTSTEEGSPAGSPTSTEEGTSESATPESGPGTSTEPSEGSAPGIVLSLDVPIGLLQILLEQARARAAREQATTNARILARVGHC

SEQ ID NO: 2073 - protein, 649 aa, Artificial Sequence
  Description of Artificial Sequence: Synthetic polypeptide
HADGSFSDEMNTILDNLAARDFINWLIETKITDGGSPAGSPTSTEEGTSESATPESGPGTSTEPSEGSAPGSPAGSPTSTEEGTSTEPSEGSAPGTSTEPSEGSAPGTSESATPESGPGSEPATSGSETPGSEPATSGSETPGSPAGSPTSTEEGTSESATPESGPGTSTEPSEGSAPGTSTEPSEGSAPGSPAGSPTSTEEGTSTEPSEGSAPGTSTEPSEGSAPGTSESATPESGPGTSTEPSEGSAPGTSESATPESGPGSEPATSGSETPGTSTEPSEGSAPGTSTEPSEGSAPGTSESATPESGPGTSESATPESGPGSPAGSPTSTEEGTSESATPESGPGSEPATSGSETPGTSESATPESGPGTSTEPSEGSAPGTSTEPSEGSAPGTSTEPSEGSAPGTSTEPSEGSAPGTSTEPSEGSAPGTSTEPSEGSAPGSPAGSPTSTEEGTSTEPSEGSAPGTSESATPESGPGSEPATSGSETPGTSESATPESGPGSEPATSGSETPGTSESATPESGPGTSTEPSEGSAPGTSESATPESGPGSPAGSPTSTEEGSPAGSPTSTEEGSPAGSPTSTEEGTSESATPESGPGTSTEPSEGSAPGFTLSLDVPTNIMNLLFNIAKAKNLRAQAAANAHLMAQI

SEQ ID NO: 2074 - protein, 689 aa, Artificial Sequence
  Description of Artificial Sequence: Synthetic polypeptide
GPETLCGAELVDALQFVCGDRGFYFNKPTGYGSSSRRAPQTGIVDECCFRSCDLRRLEMYCAPLKPAKSAGGSPAGSPTSTEEGTSESATPESGPGTSTEPSEGSAPGSPAGSPTSTEEGTSTEPSEGSAPGTSTEPSEGSAPGTSESATPESGPGSEPATSGSETPGSEPATSGSETPGSPAGSPTSTEEGTSESATPESGPGTSTEPSEGSAPGTSTEPSEGSAPGSPAGSPTSTEEGTSTEPSEGSAPGTSTEPSEGSAPGTSESATPESGPGTSTEPSEGSAPGTSESATPESGPGSEPATSGSETPGTSTEPSEGSAPGTSTEPSEGSAPGTSESATPESGPGTSESATPESGPGSPAGSPTSTEEGTSESATPESGPGSEPATSGSETPGTSESATPESGPGTSTEPSEGSAPGTSTEPSEGSAPGTSTEPSEGSAPGTSTEPSEGSAPGTSTEPSEGSAPGTSTEPSEGSAPGSPAGSPTSTEEGTSTEPSEGSAPGTSESATPESGPGSEPATSGSETPGTSESATPESGPGSEPATSGSETPGTSESATPESGPGTSTEPSEGSAPGTSESATPESGPGSPAGSPTSTEEGSPAGSPTSTEEGSPAGSPTSTEEGTSESATPESGPGTSTEPSEGSAPGIVLSLDVPIGLLQILLEQARARAAREQATTNARILARVGHC

SEQ ID NO: 2075 - protein, 686 aa, Artificial Sequence
  Description of Artificial Sequence: Synthetic polypeptide
AYRPSETLCGGELVDTLQFVCGDRGFYFSRPASRVSRRSRGIVEECCFRSCDLALLETYCATPAKSEGGSPAGSPTSTEEGTSESATPESGPGTSTEPSEGSAPGSPAGSPTSTEEGTSTEPSEGSAPGTSTEPSEGSAPGTSESATPESGPGSEPATSGSETPGSEPATSGSETPGSPAGSPTSTEEGTSESATPESGPGTSTEPSEGSAPGTSTEPSEGSAPGSPAGSPTSTEEGTSTEPSEGSAPGTSTEPSEGSAPGTSESATPESGPGTSTEPSEGSAPGTSESATPESGPGSEPATSGSETPGTSTEPSEGSAPGTSTEPSEGSAPGTSESATPESGPGTSESATPESGPGSPAGSPTSTEEGTSESATPESGPGSEPATSGSETPGTSESATPESGPGTSTEPSEGSAPGTSTEPSEGSAPGTSTEPSEGSAPGTSTEPSEGSAPGTSTEPSEGSAPGTSTEPSEGSAPGSPAGSPTSTEEGTSTEPSEGSAPGTSESATPESGPGSEPATSGSETPGTSESATPESGPGSEPATSGSETPGTSESATPESGPGTSTEPSEGSAPGTSESATPESGPGSPAGSPTSTEEGSPAGSPTSTEEGSPAGSPTSTEEGTSESATPESGPGTSTEPSEGSAPGIVLSLDVPIGLLQILLEQARARAAREQATTNARILARVGHC

SEQ ID NO: 2076 - protein, 768 aa, Artificial Sequence
  Description of Artificial Sequence: Synthetic polypeptide
EESQKKLPSSRITCPQGSVAYGSYCYSLILIPQTWSNAELSCQMHFSGHLAFLLSTGEITFVSSLVKNSLTAYQYIWIGLHDPSHGTLPNGSGWKWSSSNVLTFYNWERNPSIAADRGYCAVLSQKSGFQKWRDFNCENELPYICKFKVGGSPAGSPTSTEEGTSESATPESGPGTSTEPSEGSAPGSPAGSPTSTEEGTSTEPSEGSAPGTSTEPSEGSAPGTSESATPESGPGSEPATSGSETPGSEPATSGSETPGSPAGSPTSTEEGTSESATPESGPGTSTEPSEGSAPGTSTEPSEGSAPGSPAGSPTSTEEGTSTEPSEGSAPGTSTEPSEGSAPGTSESATPESGPGTSTEPSEGSAPGTSESATPESGPGSEPATSGSETPGTSTEPSEGSAPGTSTEPSEGSAPGTSESATPESGPGTSESATPESGPGSPAGSPTSTEEGTSESATPESGPGSEPATSGSETPGTSESATPESGPGTSTEPSEGSAPGTSTEPSEGSAPGTSTEPSEGSAPGTSTEPSEGSAPGTSTEPSEGSAPGTSTEPSEGSAPGSPAGSPTSTEEGTSTEPSEGSAPGTSESATPESGPGSEPATSGSETPGTSESATPESGPGSEPATSGSETPGTSESATPESGPGTSTEPSEGSAPGTSESATPESGPGSPAGSPTSTEEGSPAGSPTSTEEGSPAGSPTSTEEGTSESATPESGPGTSTEPSEGSAPGIVLSLDVPIGLLQILLEQARARAAREQATTNARILARVGHC

SEQ ID NO: 2077 - protein, 666 aa, Artificial Sequence
  Description of Artificial Sequence: Synthetic polypeptide
TQAQLLRVGCVLGTCQVQNLSHRLWQLMGPAGRQDSAPVDPSSPHSYGGSPAGSPTSTEEGTSESATPESGPGTSTEPSEGSAPGSPAGSPTSTEEGTSTEPSEGSAPGTSTEPSEGSAPGTSESATPESGPGSEPATSGSETPGSEPATSGSETPGSPAGSPTSTEEGTSESATPESGPGTSTEPSEGSAPGTSTEPSEGSAPGSPAGSPTSTEEGTSTEPSEGSAPGTSTEPSEGSAPGTSESATPESGPGTSTEPSEGSAPGTSESATPESGPGSEPATSGSETPGTSTEPSEGSAPGTSTEPSEGSAPGTSESATPESGPGTSESATPESGPGSPAGSPTSTEEGTSESATPESGPGSEPATSGSETPGTSESATPESGPGTSTEPSEGSAPGTSTEPSEGSAPGTSTEPSEGSAPGTSTEPSEGSAPGTSTEPSEGSAPGTSTEPSEGSAPGSPAGSPTSTEEGTSTEPSEGSAPGTSESATPESGPGSEPATSGSETPGTSESATPESGPGSEPATSGSETPGTSESATPESGPGTSTEPSEGSAPGTSESATPESGPGSPAGSPTSTEEGSPAGSPTSTEEGSPAGSPTSTEEGTSESATPESGPGTSTEPSEGSAPGIVLSLDVPIGLLQILLEQARARAAREQATTNARILARVGHC

SEQ ID NO: 2078 - protein, 765 aa, Artificial Sequence
  Description of Artificial Sequence: Synthetic polypeptide
VPIQKVQDDTKTLIKTIVTRINDISHTQSVSSKQKVTGLDFIPGLHPILTLSKMDQTLAVYQQILTSMPSRNVIQISNDLENLRDLLHVLAFSKSCHLPWASGLETLDSLGGVLEASGYSTEVVALSRLQGSLQDMLWQLDLSPGCGGSPAGSPTSTEEGTSESATPESGPGTSTEPSEGSAPGSPAGSPTSTEEGTSTEPSEGSAPGTSTEPSEGSAPGTSESATPESGPGSEPATSGSETPGSEPATSGSETPGSPAGSPTSTEEGTSESATPESGPGTSTEPSEGSAPGTSTEPSEGSAPGSPAGSPTSTEEGTSTEPSEGSAPGTSTEPSEGSAPGTSESATPESGPGTSTEPSEGSAPGTSESATPESGPGSEPATSGSETPGTSTEPSEGSAPGTSTEPSEGSAPGTSESATPESGPGTSESATPESGPGSPAGSPTSTEEGTSESATPESGPGSEPATSGSETPGTSESATPESGPGTSTEPSEGSAPGTSTEPSEGSAPGTSTEPSEGSAPGTSTEPSEGSAPGTSTEPSEGSAPGTSTEPSEGSAPGSPAGSPTSTEEGTSTEPSEGSAPGTSESATPESGPGSEPATSGSETPGTSESATPESGPGSEPATSGSETPGTSESATPESGPGTSTEPSEGSAPGTSESATPESGPGSPAGSPTSTEEGSPAGSPTSTEEGSPAGSPTSTEEGTSESATPESGPGTSTEPSEGSAPGIVLSLDVPIGLLQILLEQARARAAREQATTNARILARVGHC

SEQ ID NO: 2079 - protein, 640 aa, Artificial Sequence; identical to SEQ ID NO: 1777
  Description of Artificial Sequence: Synthetic polypeptide

SEQ ID NO: 2080 - protein, 652 aa, Artificial Sequence; identical to SEQ ID NO: 1778
  Description of Artificial Sequence: Synthetic polypeptide

SEQ ID NO: 2081 - protein, 652 aa, Artificial Sequence; identical to SEQ ID NO: 1779
  Description of Artificial Sequence: Synthetic polypeptide

SEQ ID NO: 2082 - protein, 651 aa, Artificial Sequence; identical to SEQ ID NO: 1972
  Description of Artificial Sequence: Synthetic polypeptide

SEQ ID NO: 2083 - protein, 656 aa, Artificial Sequence; identical to SEQ ID NO: 1973
  Description of Artificial Sequence: Synthetic polypeptide

SEQ ID NO: 2084 - protein, 653 aa, Artificial Sequence; identical to SEQ ID NO: 1974
  Description of Artificial Sequence: Synthetic polypeptide

SEQ ID NO: 2085 - protein, 715 aa, Artificial Sequence
  Description of Artificial Sequence: Synthetic polypeptide
GPETLCGAELVDALQFVCGDRGFYFNKPTGYGSSSRRAPQTGIVDECCFRSCDLRRLEMYCAPLKPAKSAGGSPAGSPTSTEEGTSESATPESGPGTSTEPSEGSAPGSPAGSPTSTEEGTSTEPSEGSAPGTSTEPSEGSAPGTSESATPESGPGSEPATSGSETPGSEPATSGSETPGSPAGSPTSTEEGTSESATPESGPGTSTEPSEGSAPGTSTEPSEGSAPGSPAGSPTSTEEGTSTEPSEGSAPGTSTEPSEGSAPGTSESATPESGPGTSTEPSEGSAPGTSESATPESGPGSEPATSGSETPGTSTEPSEGSAPGTSTEPSEGSAPGTSESATPESGPGTSESATPESGPGSPAGSPTSTEEGTSESATPESGPGSEPATSGSETPGTSESATPESGPGTSTEPSEGSAPGTSTEPSEGSAPGTSTEPSEGSAPGTSTEPSEGSAPGTSTEPSEGSAPGTSTEPSEGSAPGSPAGSPTSTEEGTSTEPSEGSAPGTSESATPESGPGSEPATSGSETPGTSESATPESGPGSEPATSGSETPGTSESATPESGPGTSTEPSEGSAPGTSESATPESGPGSPAGSPTSTEEGSPAGSPTSTEEGSPAGSPTSTEEGTSESATPESGPGTSTEPSEGSAPGAYRPSETLCGGELVDTLQFVCGDRGFYFSRPASRVSRRSRGIVEECCFRSCDLALLETYCATPAKSE

SEQ ID NO: 2086 - protein, 797 aa, Artificial Sequence
  Description of Artificial Sequence: Synthetic polypeptide
GPETLCGAELVDALQFVCGDRGFYFNKPTGYGSSSRRAPQTGIVDECCFRSCDLRRLEMYCAPLKPAKSAGGSPAGSPTSTEEGTSESATPESGPGTSTEPSEGSAPGSPAGSPTSTEEGTSTEPSEGSAPGTSTEPSEGSAPGTSESATPESGPGSEPATSGSETPGSEPATSGSETPGSPAGSPTSTEEGTSESATPESGPGTSTEPSEGSAPGTSTEPSEGSAPGSPAGSPTSTEEGTSTEPSEGSAPGTSTEPSEGSAPGTSESATPESGPGTSTEPSEGSAPGTSESATPESGPGSEPATSGSETPGTSTEPSEGSAPGTSTEPSEGSAPGTSESATPESGPGTSESATPESGPGSPAGSPTSTEEGTSESATPESGPGSEPATSGSETPGTSESATPESGPGTSTEPSEGSAPGTSTEPSEGSAPGTSTEPSEGSAPGTSTEPSEGSAPGTSTEPSEGSAPGTSTEPSEGSAPGSPAGSPTSTEEGTSTEPSEGSAPGTSESATPESGPGSEPATSGSETPGTSESATPESGPGSEPATSGSETPGTSESATPESGPGTSTEPSEGSAPGTSESATPESGPGSPAGSPTSTEEGSPAGSPTSTEEGSPAGSPTSTEEGTSESATPESGPGTSTEPSEGSAPGEESQKKLPSSRITCPQGSVAYGSYCYSLILIPQTWSNAELSCQMHFSGHLAFLLSTGEITFVSSLVKNSLTAYQYIWIGLHDPSHGTLPNGSGWKWSSSNVLTFYNWERNPSIAADRGYCAVLSQKSGFQKWRDFNCENELPYICKFKV

SEQ ID NO: 2087 - protein, 695 aa, Artificial Sequence; identical to SEQ ID NO: 1963
  Description of Artificial Sequence: Synthetic polypeptide

SEQ ID NO: 2088 - protein, 794 aa, Artificial Sequence
  Description of Artificial Sequence: Synthetic polypeptide
GPETLCGAELVDALQFVCGDRGFYFNKPTGYGSSSRRAPQTGIVDECCFRSCDLRRLEMYCAPLKPAKSAGGSPAGSPTSTEEGTSESATPESGPGTSTEPSEGSAPGSPAGSPTSTEEGTSTEPSEGSAPGTSTEPSEGSAPGTSESATPESGPGSEPATSGSETPGSEPATSGSETPGSPAGSPTSTEEGTSESATPESGPGTSTEPSEGSAPGTSTEPSEGSAPGSPAGSPTSTEEGTSTEPSEGSAPGTSTEPSEGSAPGTSESATPESGPGTSTEPSEGSAPGTSESATPESGPGSEPATSGSETPGTSTEPSEGSAPGTSTEPSEGSAPGTSESATPESGPGTSESATPESGPGSPAGSPTSTEEGTSESATPESGPGSEPATSGSETPGTSESATPESGPGTSTEPSEGSAPGTSTEPSEGSAPGTSTEPSEGSAPGTSTEPSEGSAPGTSTEPSEGSAPGTSTEPSEGSAPGSPAGSPTSTEEGTSTEPSEGSAPGTSESATPESGPGSEPATSGSETPGTSESATPESGPGSEPATSGSETPGTSESATPESGPGTSTEPSEGSAPGTSESATPESGPGSPAGSPTSTEEGSPAGSPTSTEEGSPAGSPTSTEEGTSESATPESGPGTSTEPSEGSAPGVPIQKVQDDTKTLIKTIVTRINDISHTQSVSSKQKVTGLDFIPGLHPILTLSKMDQTLAVYQQILTSMPSRNVIQISNDLENLRDLLHVLAFSKSCHLPWASGLETLDSLGGVLEASGYSTEVVALSRLQGSLQDMLWQLDLSPGC

SEQ ID NO: 2089 - protein, 673 aa, Artificial Sequence
  Description of Artificial Sequence: Synthetic polypeptide
GPETLCGAELVDALQFVCGDRGFYFNKPTGYGSSSRRAPQTGIVDECCFRSCDLRRLEMYCAPLKPAKSAGGSPAGSPTSTEEGTSESATPESGPGTSTEPSEGSAPGSPAGSPTSTEEGTSTEPSEGSAPGTSTEPSEGSAPGTSESATPESGPGSEPATSGSETPGSEPATSGSETPGSPAGSPTSTEEGTSESATPESGPGTSTEPSEGSAPGTSTEPSEGSAPGSPAGSPTSTEEGTSTEPSEGSAPGTSTEPSEGSAPGTSESATPESGPGTSTEPSEGSAPGTSESATPESGPGSEPATSGSETPGTSTEPSEGSAPGTSTEPSEGSAPGTSESATPESGPGTSESATPESGPGSPAGSPTSTEEGTSESATPESGPGSEPATSGSETPGTSESATPESGPGTSTEPSEGSAPGTSTEPSEGSAPGTSTEPSEGSAPGTSTEPSEGSAPGTSTEPSEGSAPGTSTEPSEGSAPGSPAGSPTSTEEGTSTEPSEGSAPGTSESATPESGPGSEPATSGSETPGTSESATPESGPGSEPATSGSETPGTSESATPESGPGTSTEPSEGSAPGTSESATPESGPGSPAGSPTSTEEGSPAGSPTSTEEGSPAGSPTSTEEGTSESATPESGPGTSTEPSEGSAPGFRVDEEFQSPFASQSRGYFLFRPRN

SEQ ID NO: 2090 - protein, 685 aa, Artificial Sequence
  Description of Artificial Sequence: Synthetic polypeptide
GPETLCGAELVDALQFVCGDRGFYFNKPTGYGSSSRRAPQTGIVDECCFRSCDLRRLEMYCAPLKPAKSAGGSPAGSPTSTEEGTSESATPESGPGTSTEPSEGSAPGSPAGSPTSTEEGTSTEPSEGSAPGTSTEPSEGSAPGTSESATPESGPGSEPATSGSETPGSEPATSGSETPGSPAGSPTSTEEGTSESATPESGPGTSTEPSEGSAPGTSTEPSEGSAPGSPAGSPTSTEEGTSTEPSEGSAPGTSTEPSEGSAPGTSESATPESGPGTSTEPSEGSAPGTSESATPESGPGSEPATSGSETPGTSTEPSEGSAPGTSTEPSEGSAPGTSESATPESGPGTSESATPESGPGSPAGSPTSTEEGTSESATPESGPGSEPATSGSETPGTSESATPESGPGTSTEPSEGSAPGTSTEPSEGSAPGTSTEPSEGSAPGTSTEPSEGSAPGTSTEPSEGSAPGTSTEPSEGSAPGSPAGSPTSTEEGTSTEPSEGSAPGTSESATPESGPGSEPATSGSETPGTSESATPESGPGSEPATSGSETPGTSESATPESGPGTSTEPSEGSAPGTSESATPESGPGSPAGSPTSTEEGSPAGSPTSTEEGSPAGSPTSTEEGTSESATPESGPGTSTEPSEGSAPGHSQGTFTSDYSKYLDSRRAQDFVQWLMNTKRNRNNIA

SEQ ID NO: 2091 - protein, 685 aa, Artificial Sequence
  Description of Artificial Sequence: Synthetic polypeptide
GPETLCGAELVDALQFVCGDRGFYFNKPTGYGSSSRRAPQTGIVDECCFRSCDLRRLEMYCAPLKPAKSAGGSPAGSPTSTEEGTSESATPESGPGTSTEPSEGSAPGSPAGSPTSTEEGTSTEPSEGSAPGTSTEPSEGSAPGTSESATPESGPGSEPATSGSETPGSEPATSGSETPGSPAGSPTSTEEGTSESATPESGPGTSTEPSEGSAPGTSTEPSEGSAPGSPAGSPTSTEEGTSTEPSEGSAPGTSTEPSEGSAPGTSESATPESGPGTSTEPSEGSAPGTSESATPESGPGSEPATSGSETPGTSTEPSEGSAPGTSTEPSEGSAPGTSESATPESGPGTSESATPESGPGSPAGSPTSTEEGTSESATPESGPGSEPATSGSETPGTSESATPESGPGTSTEPSEGSAPGTSTEPSEGSAPGTSTEPSEGSAPGTSTEPSEGSAPGTSTEPSEGSAPGTSTEPSEGSAPGSPAGSPTSTEEGTSTEPSEGSAPGTSESATPESGPGSEPATSGSETPGTSESATPESGPGSEPATSGSETPGTSESATPESGPGTSTEPSEGSAPGTSESATPESGPGSPAGSPTSTEEGSPAGSPTSTEEGSPAGSPTSTEEGTSESATPESGPGTSTEPSEGSAPGKCNTATCATNRLANFLVHSSNNFGPILPPTNVGSNTY

SEQ ID NO: 2092 - protein, 684 aa, Artificial Sequence
  Description of Artificial Sequence: Synthetic polypeptide
GPETLCGAELVDALQFVCGDRGFYFNKPTGYGSSSRRAPQTGIVDECCFRSCDLRRLEMYCAPLKPAKSAGGSPAGSPTSTEEGTSESATPESGPGTSTEPSEGSAPGSPAGSPTSTEEGTSTEPSEGSAPGTSTEPSEGSAPGTSESATPESGPGSEPATSGSETPGSEPATSGSETPGSPAGSPTSTEEGTSESATPESGPGTSTEPSEGSAPGTSTEPSEGSAPGSPAGSPTSTEEGTSTEPSEGSAPGTSTEPSEGSAPGTSESATPESGPGTSTEPSEGSAPGTSESATPESGPGSEPATSGSETPGTSTEPSEGSAPGTSTEPSEGSAPGTSESATPESGPGTSESATPESGPGSPAGSPTSTEEGTSESATPESGPGSEPATSGSETPGTSESATPESGPGTSTEPSEGSAPGTSTEPSEGSAPGTSTEPSEGSAPGTSTEPSEGSAPGTSTEPSEGSAPGTSTEPSEGSAPGSPAGSPTSTEEGTSTEPSEGSAPGTSESATPESGPGSEPATSGSETPGTSESATPESGPGSEPATSGSETPGTSESATPESGPGTSTEPSEGSAPGTSESATPESGPGSPAGSPTSTEEGSPAGSPTSTEEGSPAGSPTSTEEGTSESATPESGPGTSTEPSEGSAPGYPIKPEAPGEDASPEELNRYYASLRHYLNLVTRQRY

SEQ ID NO: 2093 - protein, 689 aa, Artificial Sequence; identical to SEQ ID NO: 2074
  Description of Artificial Sequence: Synthetic polypeptide

SEQ ID NO: 2094 - protein, 686 aa, Artificial Sequence
  Description of Artificial Sequence: Synthetic polypeptide
GPETLCGAELVDALQFVCGDRGFYFNKPTGYGSSSRRAPQTGIVDECCFRSCDLRRLEMYCAPLKPAKSAGGSPAGSPTSTEEGTSESATPESGPGTSTEPSEGSAPGSPAGSPTSTEEGTSTEPSEGSAPGTSTEPSEGSAPGTSESATPESGPGSEPATSGSETPGSEPATSGSETPGSPAGSPTSTEEGTSESATPESGPGTSTEPSEGSAPGTSTEPSEGSAPGSPAGSPTSTEEGTSTEPSEGSAPGTSTEPSEGSAPGTSESATPESGPGTSTEPSEGSAPGTSESATPESGPGSEPATSGSETPGTSTEPSEGSAPGTSTEPSEGSAPGTSESATPESGPGTSESATPESGPGSPAGSPTSTEEGTSESATPESGPGSEPATSGSETPGTSESATPESGPGTSTEPSEGSAPGTSTEPSEGSAPGTSTEPSEGSAPGTSTEPSEGSAPGTSTEPSEGSAPGTSTEPSEGSAPGSPAGSPTSTEEGTSTEPSEGSAPGTSESATPESGPGSEPATSGSETPGTSESATPESGPGSEPATSGSETPGTSESATPESGPGTSTEPSEGSAPGTSESATPESGPGSPAGSPTSTEEGSPAGSPTSTEEGSPAGSPTSTEEGTSESATPESGPGTSTEPSEGSAPGFTLSLDVPTNIMNLLFNIAKAKNLRAQAAANAHLMAQI

SEQ ID NO: 2095 - protein, 715 aa, Artificial Sequence
  Description of Artificial Sequence: Synthetic polypeptide
AYRPSETLCGGELVDTLQFVCGDRGFYFSRPASRVSRRSRGIVEECCFRSCDLALLETYCATPAKSEGGSPAGSPTSTEEGTSESATPESGPGTSTEPSEGSAPGSPAGSPTSTEEGTSTEPSEGSAPGTSTEPSEGSAPGTSESATPESGPGSEPATSGSETPGSEPATSGSETPGSPAGSPTSTEEGTSESATPESGPGTSTEPSEGSAPGTSTEPSEGSAPGSPAGSPTSTEEGTSTEPSEGSAPGTSTEPSEGSAPGTSESATPESGPGTSTEPSEGSAPGTSESATPESGPGSEPATSGSETPGTSTEPSEGSAPGTSTEPSEGSAPGTSESATPESGPGTSESATPESGPGSPAGSPTSTEEGTSESATPESGPGSEPATSGSETPGTSESATPESGPGTSTEPSEGSAPGTSTEPSEGSAPGTSTEPSEGSAPGTSTEPSEGSAPGTSTEPSEGSAPGTSTEPSEGSAPGSPAGSPTSTEEGTSTEPSEGSAPGTSESATPESGPGSEPATSGSETPGTSESATPESGPGSEPATSGSETPGTSESATPESGPGTSTEPSEGSAPGTSESATPESGPGSPAGSPTSTEEGSPAGSPTSTEEGSPAGSPTSTEEGTSESATPESGPGTSTEPSEGSAPGGPETLCGAELVDALQFVCGDRGFYFNKPTGYGSSSRRAPQTGIVDECCFRSCDLRRLEMYCAPLKPAKSA

SEQ ID NO: 2096 - protein, 797 aa, Artificial Sequence
  Description of Artificial Sequence: Synthetic polypeptide
EESQKKLPSSRITCPQGSVAYGSYCYSLILIPQTWSNAELSCQMHFSGHLAFLLSTGEITFVSSLVKNSLTAYQYIWIGLHDPSHGTLPNGSGWKWSSSNVLTFYNWERNPSIAADRGYCAVLSQKSGFQKWRDFNCENELPYICKFKVGGSPAGSPTSTEEGTSESATPESGPGTSTEPSEGSAPGSPAGSPTSTEEGTSTEPSEGSAPGTSTEPSEGSAPGTSESATPESGPGSEPATSGSETPGSEPATSGSETPGSPAGSPTSTEEGTSESATPESGPGTSTEPSEGSAPGTSTEPSEGSAPGSPAGSPTSTEEGTSTEPSEGSAPGTSTEPSEGSAPGTSESATPESGPGTSTEPSEGSAPGTSESATPESGPGSEPATSGSETPGTSTEPSEGSAPGTSTEPSEGSAPGTSESATPESGPGTSESATPESGPGSPAGSPTSTEEGTSESATPESGPGSEPATSGSETPGTSESATPESGPGTSTEPSEGSAPGTSTEPSEGSAPGTSTEPSEGSAPGTSTEPSEGSAPGTSTEPSEGSAPGTSTEPSEGSAPGSPAGSPTSTEEGTSTEPSEGSAPGTSESATPESGPGSEPATSGSETPGTSESATPESGPGSEPATSGSETPGTSESATPESGPGTSTEPSEGSAPGTSESATPESGPGSPAGSPTSTEEGSPAGSPTSTEEGSPAGSPTSTEEGTSESATPESGPGTSTEPSEGSAPGGPETLCGAELVDALQFVCGDRGFYFNKPTGYGSSSRRAPQTGIVDECCFRSCDLRRLEMYCAPLKPAKSA

SEQ ID NO: 2097 - protein, 695 aa, Artificial Sequence
  Description of Artificial Sequence: Synthetic polypeptide
TQAQLLRVGCVLGTCQVQNLSHRLWQLMGPAGRQDSAPVDPSSPHSYGGSPAGSPTSTEEGTSESATPESGPGTSTEPSEGSAPGSPAGSPTSTEEGTSTEPSEGSAPGTSTEPSEGSAPGTSESATPESGPGSEPATSGSETPGSEPATSGSETPGSPAGSPTSTEEGTSESATPESGPGTSTEPSEGSAPGTSTEPSEGSAPGSPAGSPTSTEEGTSTEPSEGSAPGTSTEPSEGSAPGTSESATPESGPGTSTEPSEGSAPGTSESATPESGPGSEPATSGSETPGTSTEPSEGSAPGTSTEPSEGSAPGTSESATPESGPGTSESATPESGPGSPAGSPTSTEEGTSESATPESGPGSEPATSGSETPGTSESATPESGPGTSTEPSEGSAPGTSTEPSEGSAPGTSTEPSEGSAPGTSTEPSEGSAPGTSTEPSEGSAPGTSTEPSEGSAPGSPAGSPTSTEEGTSTEPSEGSAPGTSESATPESGPGSEPATSGSETPGTSESATPESGPGSEPATSGSETPGTSESATPESGPGTSTEPSEGSAPGTSESATPESGPGSPAGSPTSTEEGSPAGSPTSTEEGSPAGSPTSTEEGTSESATPESGPGTSTEPSEGSAPGGPETLCGAELVDALQFVCGDRGFYFNKPTGYGSSSRRAPQTGIVDECCFRSCDLRRLEMYCAPLKPAKSA

SEQ ID NO: 2098 - protein, 794 aa, Artificial Sequence
  Description of Artificial Sequence: Synthetic polypeptide
VPIQKVQDDTKTLIKTIVTRINDISHTQSVSSKQKVTGLDFIPGLHPILTLSKMDQTLAVYQQILTSMPSRNVIQISNDLENLRDLLHVLAFSKSCHLPWASGLETLDSLGGVLEASGYSTEVVALSRLQGSLQDMLWQLDLSPGCGGSPAGSPTSTEEGTSESATPESGPGTSTEPSEGSAPGSPAGSPTSTEEGTSTEPSEGSAPGTSTEPSEGSAPGTSESATPESGPGSEPATSGSETPGSEPATSGSETPGSPAGSPTSTEEGTSESATPESGPGTSTEPSEGSAPGTSTEPSEGSAPGSPAGSPTSTEEGTSTEPSEGSAPGTSTEPSEGSAPGTSESATPESGPGTSTEPSEGSAPGTSESATPESGPGSEPATSGSETPGTSTEPSEGSAPGTSTEPSEGSAPGTSESATPESGPGTSESATPESGPGSPAGSPTSTEEGTSESATPESGPGSEPATSGSETPGTSESATPESGPGTSTEPSEGSAPGTSTEPSEGSAPGTSTEPSEGSAPGTSTEPSEGSAPGTSTEPSEGSAPGTSTEPSEGSAPGSPAGSPTSTEEGTSTEPSEGSAPGTSESATPESGPGSEPATSGSETPGTSESATPESGPGSEPATSGSETPGTSESATPESGPGTSTEPSEGSAPGTSESATPESGPGSPAGSPTSTEEGSPAGSPTSTEEGSPAGSPTSTEEGTSESATPESGPGTSTEPSEGSAPGGPETLCGAELVDALQFVCGDRGFYFNKPTGYGSSSRRAPQTGIVDECCFRSCDLRRLEMYCAPLKPAKSA

SEQ ID NO: 2099 - protein, 673 aa, Artificial Sequence
  Description of Artificial Sequence: Synthetic polypeptide
FRVDEEFQSPFASQSRGYFLFRPRNGGSPAGSPTSTEEGTSESATPESGPGTSTEPSEGSAPGSPAGSPTSTEEGTSTEPSEGSAPGTSTEPSEGSAPGTSESATPESGPGSEPATSGSETPGSEPATSGSETPGSPAGSPTSTEEGTSESATPESGPGTSTEPSEGSAPGTSTEPSEGSAPGSPAGSPTSTEEGTSTEPSEGSAPGTSTEPSEGSAPGTSESATPESGPGTSTEPSEGSAPGTSESATPESGPGSEPATSGSETPGTSTEPSEGSAPGTSTEPSEGSAPGTSESATPESGPGTSESATPESGPGSPAGSPTSTEEGTSESATPESGPGSEPATSGSETPGTSESATPESGPGTSTEPSEGSAPGTSTEPSEGSAPGTSTEPSEGSAPGTSTEPSEGSAPGTSTEPSEGSAPGTSTEPSEGSAPGSPAGSPTSTEEGTSTEPSEGSAPGTSESATPESGPGSEPATSGSETPGTSESATPESGPGSEPATSGSETPGTSESATPESGPGTSTEPSEGSAPGTSESATPESGPGSPAGSPTSTEEGSPAGSPTSTEEGSPAGSPTSTEEGTSESATPESGPGTSTEPSEGSAPGGPETLCGAELVDALQFVCGDRGFYFNKPTGYGSSSRRAPQTGIVDECCFRSCDLRRLEMYCAPLKPAKSA

SEQ ID NO: 2100 - protein, 685 aa, Artificial Sequence
  Description of Artificial Sequence: Synthetic polypeptide
HSQGTFTSDYSKYLDSRRAQDFVQWLMNTKRNRNNIAGGSPAGSPTSTEEGTSESATPESGPGTSTEPSEGSAPGSPAGSPTSTEEGTSTEPSEGSAPGTSTEPSEGSAPGTSESATPESGPGSEPATSGSETPGSEPATSGSETPGSPAGSPTSTEEGTSESATPESGPGTSTEPSEGSAPGTSTEPSEGSAPGSPAGSPTSTEEGTSTEPSEGSAPGTSTEPSEGSAPGTSESATPESGPGTSTEPSEGSAPGTSESATPESGPGSEPATSGSETPGTSTEPSEGSAPGTSTEPSEGSAPGTSESATPESGPGTSESATPESGPGSPAGSPTSTEEGTSESATPESGPGSEPATSGSETPGTSESATPESGPGTSTEPSEGSAPGTSTEPSEGSAPGTSTEPSEGSAPGTSTEPSEGSAPGTSTEPSEGSAPGTSTEPSEGSAPGSPAGSPTSTEEGTSTEPSEGSAPGTSESATPESGPGSEPATSGSETPGTSESATPESGPGSEPATSGSETPGTSESATPESGPGTSTEPSEGSAPGTSESATPESGPGSPAGSPTSTEEGSPAGSPTSTEEGSPAGSPTSTEEGTSESATPESGPGTSTEPSEGSAPGGPETLCGAELVDALQFVCGDRGFYFNKPTGYGSSSRRAPQTGIVDECCFRSCDLRRLEMYCAPLKPAKSA

SEQ ID NO: 2101 - protein, 685 aa, Artificial Sequence
  Description of Artificial Sequence: Synthetic polypeptide
KCNTATCATNRLANFLVHSSNNFGPILPPTNVGSNTYGGSPAGSPTSTEEGTSESATPESGPGTSTEPSEGSAPGSPAGSPTSTEEGTSTEPSEGSAPGTSTEPSEGSAPGTSESATPESGPGSEPATSGSETPGSEPATSGSETPGSPAGSPTSTEEGTSESATPESGPGTSTEPSEGSAPGTSTEPSEGSAPGSPAGSPTSTEEGTSTEPSEGSAPGTSTEPSEGSAPGTSESATPESGPGTSTEPSEGSAPGTSESATPESGPGSEPATSGSETPGTSTEPSEGSAPGTSTEPSEGSAPGTSESATPESGPGTSESATPESGPGSPAGSPTSTEEGTSESATPESGPGSEPATSGSETPGTSESATPESGPGTSTEPSEGSAPGTSTEPSEGSAPGTSTEPSEGSAPGTSTEPSEGSAPGTSTEPSEGSAPGTSTEPSEGSAPGSPAGSPTSTEEGTSTEPSEGSAPGTSESATPESGPGSEPATSGSETPGTSESATPESGPGSEPATSGSETPGTSESATPESGPGTSTEPSEGSAPGTSESATPESGPGSPAGSPTSTEEGSPAGSPTSTEEGSPAGSPTSTEEGTSESATPESGPGTSTEPSEGSAPGGPETLCGAELVDALQFVCGDRGFYFNKPTGYGSSSRRAPQTGIVDECCFRSCDLRRLEMYCAPLKPAKSA

SEQ ID NO: 2102 - protein, 684 aa, Artificial Sequence
  Description of Artificial Sequence: Synthetic polypeptide
YPIKPEAPGEDASPEELNRYYASLRHYLNLVTRQRYGGSPAGSPTSTEEGTSESATPESGPGTSTEPSEGSAPGSPAGSPTSTEEGTSTEPSEGSAPGTSTEPSEGSAPGTSESATPESGPGSEPATSGSETPGSEPATSGSETPGSPAGSPTSTEEGTSESATPESGPGTSTEPSEGSAPGTSTEPSEGSAPGSPAGSPTSTEEGTSTEPSEGSAPGTSTEPSEGSAPGTSESATPESGPGTSTEPSEGSAPGTSESATPESGPGSEPATSGSETPGTSTEPSEGSAPGTSTEPSEGSAPGTSESATPESGPGTSESATPESGPGSPAGSPTSTEEGTSESATPESGPGSEPATSGSETPGTSESATPESGPGTSTEPSEGSAPGTSTEPSEGSAPGTSTEPSEGSAPGTSTEPSEGSAPGTSTEPSEGSAPGTSTEPSEGSAPGSPAGSPTSTEEGTSTEPSEGSAPGTSESATPESGPGSEPATSGSETPGTSESATPESGPGSEPATSGSETPGTSESATPESGPGTSTEPSEGSAPGTSESATPESGPGSPAGSPTSTEEGSPAGSPTSTEEGSPAGSPTSTEEGTSESATPESGPGTSTEPSEGSAPGGPETLCGAELVDALQFVCGDRGFYFNKPTGYGSSSRRAPQTGIVDECCFRSCDLRRLEMYCAPLKPAKSA

SEQ ID NO: 2103 - protein, 689 aa, Artificial Sequence
  Description of Artificial Sequence: Synthetic polypeptide
IVLSLDVPIGLLQILLEQARARAAREQATTNARILARVGHCGGSPAGSPTSTEEGTSESATPESGPGTSTEPSEGSAPGSPAGSPTSTEEGTSTEPSEGSAPGTSTEPSEGSAPGTSESATPESGPGSEPATSGSETPGSEPATSGSETPGSPAGSPTSTEEGTSESATPESGPGTSTEPSEGSAPGTSTEPSEGSAPGSPAGSPTSTEEGTSTEPSEGSAPGTSTEPSEGSAPGTSESATPESGPGTSTEPSEGSAPGTSESATPESGPGSEPATSGSETPGTSTEPSEGSAPGTSTEPSEGSAPGTSESATPESGPGTSESATPESGPGSPAGSPTSTEEGTSESATPESGPGSEPATSGSETPGTSESATPESGPGTSTEPSEGSAPGTSTEPSEGSAPGTSTEPSEGSAPGTSTEPSEGSAPGTSTEPSEGSAPGTSTEPSEGSAPGSPAGSPTSTEEGTSTEPSEGSAPGTSESATPESGPGSEPATSGSETPGTSESATPESGPGSEPATSGSETPGTSESATPESGPGTSTEPSEGSAPGTSESATPESGPGSPAGSPTSTEEGSPAGSPTSTEEGSPAGSPTSTEEGTSESATPESGPGTSTEPSEGSAPGGPETLCGAELVDALQFVCGDRGFYFNKPTGYGSSSRRAPQTGIVDECCFRSCDLRRLEMYCAPLKPAKSA

SEQ ID NO: 2104 - protein, 686 aa, Artificial Sequence
  Description of Artificial Sequence: Synthetic polypeptide
FTLSLDVPTNIMNLLFNIAKAKNLRAQAAANAHLMAQIGGSPAGSPTSTEEGTSESATPESGPGTSTEPSEGSAPGSPAGSPTSTEEGTSTEPSEGSAPGTSTEPSEGSAPGTSESATPESGPGSEPATSGSETPGSEPATSGSETPGSPAGSPTSTEEGTSESATPESGPGTSTEPSEGSAPGTSTEPSEGSAPGSPAGSPTSTEEGTSTEPSEGSAPGTSTEPSEGSAPGTSESATPESGPGTSTEPSEGSAPGTSESATPESGPGSEPATSGSETPGTSTEPSEGSAPGTSTEPSEGSAPGTSESATPESGPGTSESATPESGPGSPAGSPTSTEEGTSESATPESGPGSEPATSGSETPGTSESATPESGPGTSTEPSEGSAPGTSTEPSEGSAPGTSTEPSEGSAPGTSTEPSEGSAPGTSTEPSEGSAPGTSTEPSEGSAPGSPAGSPTSTEEGTSTEPSEGSAPGTSESATPESGPGSEPATSGSETPGTSESATPESGPGSEPATSGSETPGTSESATPESGPGTSTEPSEGSAPGTSESATPESGPGSPAGSPTSTEEGSPAGSPTSTEEGSPAGSPTSTEEGTSESATPESGPGTSTEPSEGSAPGGPETLCGAELVDALQFVCGDRGFYFNKPTGYGSSSRRAPQTGIVDECCFRSCDLRRLEMYCAPLKPAKSA

SEQ ID NO: 2105 - protein, 794 aa, Artificial Sequence
  Description of Artificial Sequence: Synthetic polypeptide
AYRPSETLCGGELVDTLQFVCGDRGFYFSRPASRVSRRSRGIVEECCFRSCDLALLETYCATPAKSEGGSPAGSPTSTEEGTSESATPESGPGTSTEPSEGSAPGSPAGSPTSTEEGTSTEPSEGSAPGTSTEPSEGSAPGTSESATPESGPGSEPATSGSETPGSEPATSGSETPGSPAGSPTSTEEGTSESATPESGPGTSTEPSEGSAPGTSTEPSEGSAPGSPAGSPTSTEEGTSTEPSEGSAPGTSTEPSEGSAPGTSESATPESGPGTSTEPSEGSAPGTSESATPESGPGSEPATSGSETPGTSTEPSEGSAPGTSTEPSEGSAPGTSESATPESGPGTSESATPESGPGSPAGSPTSTEEGTSESATPESGPGSEPATSGSETPGTSESATPESGPGTSTEPSEGSAPGTSTEPSEGSAPGTSTEPSEGSAPGTSTEPSEGSAPGTSTEPSEGSAPGTSTEPSEGSAPGSPAGSPTSTEEGTSTEPSEGSAPGTSESATPESGPGSEPATSGSETPGTSESATPESGPGSEPATSGSETPGTSESATPESGPGTSTEPSEGSAPGTSESATPESGPGSPAGSPTSTEEGSPAGSPTSTEEGSPAGSPTSTEEGTSESATPESGPGTSTEPSEGSAPGEESQKKLPSSRITCPQGSVAYGSYCYSLILIPQTWSNAELSCQMHFSGHLAFLLSTGEITFVSSLVKNSLTAYQYIWIGLHDPSHGTLPNGSGWKWSSSNVLTFYNWERNPSIAADRGYCAVLSQKSGFQKWRDFNCENELPYICKFKV

SEQ ID NO: 2106 - protein, 692 aa, Artificial Sequence; identical to SEQ ID NO: 1964
  Description of Artificial Sequence: Synthetic polypeptide

SEQ ID NO: 2107 - protein, 791 aa, Artificial Sequence
  Description of Artificial Sequence: Synthetic polypeptide
AYRPSETLCGGELVDTLQFVCGDRGFYFSRPASRVSRRSRGIVEECCFRSCDLALLETYCATPAKSEGGSPAGSPTSTEEGTSESATPESGPGTSTEPSEGSAPGSPAGSPTSTEEGTSTEPSEGSAPGTSTEPSEGSAPGTSESATPESGPGSEPATSGSETPGSEPATSGSETPGSPAGSPTSTEEGTSESATPESGPGTSTEPSEGSAPGTSTEPSEGSAPGSPAGSPTSTEEGTSTEPSEGSAPGTSTEPSEGSAPGTSESATPESGPGTSTEPSEGSAPGTSESATPESGPGSEPATSGSETPGTSTEPSEGSAPGTSTEPSEGSAPGTSESATPESGPGTSESATPESGPGSPAGSPTSTEEGTSESATPESGPGSEPATSGSETPGTSESATPESGPGTSTEPSEGSAPGTSTEPSEGSAPGTSTEPSEGSAPGTSTEPSEGSAPGTSTEPSEGSAPGTSTEPSEGSAPGSPAGSPTSTEEGTSTEPSEGSAPGTSESATPESGPGSEPATSGSETPGTSESATPESGPGSEPATSGSETPGTSESATPESGPGTSTEPSEGSAPGTSESATPESGPGSPAGSPTSTEEGSPAGSPTSTEEGSPAGSPTSTEEGTSESATPESGPGTSTEPSEGSAPGVPIQKVQDDTKTLIKTIVTRINDISHTQSVSSKQKVTGLDFIPGLHPILTLSKMDQTLAVYQQILTSMPSRNVIQISNDLENLRDLLHVLAFSKSCHLPWASGLETLDSLGGVLEASGYSTEVVALSRLQGSLQDMLWQLDLSPGC

SEQ ID NO: 2108 - protein, 670 aa, Artificial Sequence
  Description of Artificial Sequence: Synthetic polypeptide
AYRPSETLCGGELVDTLQFVCGDRGFYFSRPASRVSRRSRGIVEECCFRSCDLALLETYCATPAKSEGGSPAGSPTSTEEGTSESATPESGPGTSTEPSEGSAPGSPAGSPTSTEEGTSTEPSEGSAPGTSTEPSEGSAPGTSESATPESGPGSEPATSGSETPGSEPATSGSETPGSPAGSPTSTEEGTSESATPESGPGTSTEPSEGSAPGTSTEPSEGSAPGSPAGSPTSTEEGTSTEPSEGSAPGTSTEPSEGSAPGTSESATPESGPGTSTEPSEGSAPGTSESATPESGPGSEPATSGSETPGTSTEPSEGSAPGTSTEPSEGSAPGTSESATPESGPGTSESATPESGPGSPAGSPTSTEEGTSESATPESGPGSEPATSGSETPGTSESATPESGPGTSTEPSEGSAPGTSTEPSEGSAPGTSTEPSEGSAPGTSTEPSEGSAPGTSTEPSEGSAPGTSTEPSEGSAPGSPAGSPTSTEEGTSTEPSEGSAPGTSESATPESGPGSEPATSGSETPGTSESATPESGPGSEPATSGSETPGTSESATPESGPGTSTEPSEGSAPGTSESATPESGPGSPAGSPTSTEEGSPAGSPTSTEEGSPAGSPTSTEEGTSESATPESGPGTSTEPSEGSAPGFRVDEEFQSPFASQSRGYFLFRPRN

SEQ ID NO: 2109 - protein, 682 aa, Artificial Sequence
  Description of Artificial Sequence: Synthetic polypeptide
AYRPSETLCGGELVDTLQFVCGDRGFYFSRPASRVSRRSRGIVEECCFRSCDLALLETYCATPAKSEGGSPAGSPTSTEEGTSESATPESGPGTSTEPSEGSAPGSPAGSPTSTEEGTSTEPSEGSAPGTSTEPSEGSAPGTSESATPESGPGSEPATSGSETPGSEPATSGSETPGSPAGSPTSTEEGTSESATPESGPGTSTEPSEGSAPGTSTEPSEGSAPGSPAGSPTSTEEGTSTEPSEGSAPGTSTEPSEGSAPGTSESATPESGPGTSTEPSEGSAPGTSESATPESGPGSEPATSGSETPGTSTEPSEGSAPGTSTEPSEGSAPGTSESATPESGPGTSESATPESGPGSPAGSPTSTEEGTSESATPESGPGSEPATSGSETPGTSESATPESGPGTSTEPSEGSAPGTSTEPSEGSAPGTSTEPSEGSAPGTSTEPSEGSAPGTSTEPSEGSAPGTSTEPSEGSAPGSPAGSPTSTEEGTSTEPSEGSAPGTSESATPESGPGSEPATSGSETPGTSESATPESGPGSEPATSGSETPGTSESATPESGPGTSTEPSEGSAPGTSESATPESGPGSPAGSPTSTEEGSPAGSPTSTEEGSPAGSPTSTEEGTSESATPESGPGTSTEPSEGSAPGHSQGTFTSDYSKYLDSRRAQDFVQWLMNTKRNRNNIA

SEQ ID NO: 2110 - protein, 682 aa, Artificial Sequence
  Description of Artificial Sequence: Synthetic polypeptide
AYRPSETLCGGELVDTLQFVCGDRGFYFSRPASRVSRRSRGIVEECCFRSCDLALLETYCATPAKSEGGSPAGSPTSTEEGTSESATPESGPGTSTEPSEGSAPGSPAGSPTSTEEGTSTEPSEGSAPGTSTEPSEGSAPGTSESATPESGPGSEPATSGSETPGSEPATSGSETPGSPAGSPTSTEEGTSESATPESGPGTSTEPSEGSAPGTSTEPSEGSAPGSPAGSPTSTEEGTSTEPSEGSAPGTSTEPSEGSAPGTSESATPESGPGTSTEPSEGSAPGTSESATPESGPGSEPATSGSETPGTSTEPSEGSAPGTSTEPSEGSAPGTSESATPESGPGTSESATPESGPGSPAGSPTSTEEGTSESATPESGPGSEPATSGSETPGTSESATPESGPGTSTEPSEGSAPGTSTEPSEGSAPGTSTEPSEGSAPGTSTEPSEGSAPGTSTEPSEGSAPGTSTEPSEGSAPGSPAGSPTSTEEGTSTEPSEGSAPGTSESATPESGPGSEPATSGSETPGTSESATPESGPGSEPATSGSETPGTSESATPESGPGTSTEPSEGSAPGTSESATPESGPGSPAGSPTSTEEGSPAGSPTSTEEGSPAGSPTSTEEGTSESATPESGPGTSTEPSEGSAPGKCNTATCATNRLANFLVHSSNNFGPILPPTNVGSNTY

SEQ ID NO: 2111 - protein, 681 aa, Artificial Sequence
  Description of Artificial Sequence: Synthetic polypeptide
AYRPSETLCGGELVDTLQFVCGDRGFYFSRPASRVSRRSRGIVEECCFRSCDLALLETYCATPAKSEGGSPAGSPTSTEEGTSESATPESGPGTSTEPSEGSAPGSPAGSPTSTEEGTSTEPSEGSAPGTSTEPSEGSAPGTSESATPESGPGSEPATSGSETPGSEPATSGSETPGSPAGSPTSTEEGTSESATPESGPGTSTEPSEGSAPGTSTEPSEGSAPGSPAGSPTSTEEGTSTEPSEGSAPGTSTEPSEGSAPGTSESATPESGPGTSTEPSEGSAPGTSESATPESGPGSEPATSGSETPGTSTEPSEGSAPGTSTEPSEGSAPGTSESATPESGPGTSESATPESGPGSPAGSPTSTEEGTSESATPESGPGSEPATSGSETPGTSESATPESGPGTSTEPSEGSAPGTSTEPSEGSAPGTSTEPSEGSAPGTSTEPSEGSAPGTSTEPSEGSAPGTSTEPSEGSAPGSPAGSPTSTEEGTSTEPSEGSAPGTSESATPESGPGSEPATSGSETPGTSESATPESGPGSEPATSGSETPGTSESATPESGPGTSTEPSEGSAPGTSESATPESGPGSPAGSPTSTEEGSPAGSPTSTEEGSPAGSPTSTEEGTSESATPESGPGTSTEPSEGSAPGYPIKPEAPGEDASPEELNRYYASLRHYLNLVTRQRY

SEQ ID NO: 2112 - protein, 686 aa, Artificial Sequence; identical to SEQ ID NO: 2075
  Description of Artificial Sequence: Synthetic polypeptide

SEQ ID NO: 2113 - protein, 683 aa, Artificial Sequence
  Description of Artificial Sequence: Synthetic polypeptide
AYRPSETLCGGELVDTLQFVCGDRGFYFSRPASRVSRRSRGIVEECCFRSCDLALLETYCATPAKSEGGSPAGSPTSTEEGTSESATPESGPGTSTEPSEGSAPGSPAGSPTSTEEGTSTEPSEGSAPGTSTEPSEGSAPGTSESATPESGPGSEPATSGSETPGSEPATSGSETPGSPAGSPTSTEEGTSESATPESGPGTSTEPSEGSAPGTSTEPSEGSAPGSPAGSPTSTEEGTSTEPSEGSAPGTSTEPSEGSAPGTSESATPESGPGTSTEPSEGSAPGTSESATPESGPGSEPATSGSETPGTSTEPSEGSAPGTSTEPSEGSAPGTSESATPESGPGTSESATPESGPGSPAGSPTSTEEGTSESATPESGPGSEPATSGSETPGTSESATPESGPGTSTEPSEGSAPGTSTEPSEGSAPGTSTEPSEGSAPGTSTEPSEGSAPGTSTEPSEGSAPGTSTEPSEGSAPGSPAGSPTSTEEGTSTEPSEGSAPGTSESATPESGPGSEPATSGSETPGTSESATPESGPGSEPATSGSETPGTSESATPESGPGTSTEPSEGSAPGTSESATPESGPGSPAGSPTSTEEGSPAGSPTSTEEGSPAGSPTSTEEGTSESATPESGPGTSTEPSEGSAPGFTLSLDVPTNIMNLLFNIAKAKNLRAQAAANAHLMAQI

SEQ ID NO: 2114 - protein, 774 aa, Artificial Sequence; identical to SEQ ID NO: 1965
  Description of Artificial Sequence: Synthetic polypeptide

SEQ ID NO: 2115 - protein, 873 aa, Artificial Sequence
  Description of Artificial Sequence: Synthetic polypeptide
EESQKKLPSSRITCPQGSVAYGSYCYSLILIPQTWSNAELSCQMHFSGHLAFLLSTGEITFVSSLVKNSLTAYQYIWIGLHDPSHGTLPNGSGWKWSSSNVLTFYNWERNPSIAADRGYCAVLSQKSGFQKWRDFNCENELPYICKFKVGGSPAGSPTSTEEGTSESATPESGPGTSTEPSEGSAPGSPAGSPTSTEEGTSTEPSEGSAPGTSTEPSEGSAPGTSESATPESGPGSEPATSGSETPGSEPATSGSETPGSPAGSPTSTEEGTSESATPESGPGTSTEPSEGSAPGTSTEPSEGSAPGSPAGSPTSTEEGTSTEPSEGSAPGTSTEPSEGSAPGTSESATPESGPGTSTEPSEGSAPGTSESATPESGPGSEPATSGSETPGTSTEPSEGSAPGTSTEPSEGSAPGTSESATPESGPGTSESATPESGPGSPAGSPTSTEEGTSESATPESGPGSEPATSGSETPGTSESATPESGPGTSTEPSEGSAPGTSTEPSEGSAPGTSTEPSEGSAPGTSTEPSEGSAPGTSTEPSEGSAPGTSTEPSEGSAPGSPAGSPTSTEEGTSTEPSEGSAPGTSESATPESGPGSEPATSGSETPGTSESATPESGPGSEPATSGSETPGTSESATPESGPGTSTEPSEGSAPGTSESATPESGPGSPAGSPTSTEEGSPAGSPTSTEEGSPAGSPTSTEEGTSESATPESGPGTSTEPSEGSAPGVPIQKVQDDTKTLIKTIVTRINDISHTQSVSSKQKVTGLDFIPGLHPILTLSKMDQTLAVYQQILTSMPSRNVIQISNDLENLRDLLHVLAFSKSCHLPWASGLETLDSLGGVLEASGYSTEVVALSRLQGSLQDMLWQLDLSPGC

SEQ ID NO: 2116 - protein, 752 aa, Artificial Sequence
  Description of Artificial Sequence: Synthetic polypeptide
EESQKKLPSSRITCPQGSVAYGSYCYSLILIPQTWSNAELSCQMHFSGHLAFLLSTGEITFVSSLVKNSLTAYQYIWIGLHDPSHGTLPNGSGWKWSSSNVLTFYNWERNPSIAADRGYCAVLSQKSGFQKWRDFNCENELPYICKFKVGGSPAGSPTSTEEGTSESATPESGPGTSTEPSEGSAPGSPAGSPTSTEEGTSTEPSEGSAPGTSTEPSEGSAPGTSESATPESGPGSEPATSGSETPGSEPATSGSETPGSPAGSPTSTEEGTSESATPESGPGTSTEPSEGSAPGTSTEPSEGSAPGSPAGSPTSTEEGTSTEPSEGSAPGTSTEPSEGSAPGTSESATPESGPGTSTEPSEGSAPGTSESATPESGPGSEPATSGSETPGTSTEPSEGSAPGTSTEPSEGSAPGTSESATPESGPGTSESATPESGPGSPAGSPTSTEEGTSESATPESGPGSEPATSGSETPGTSESATPESGPGTSTEPSEGSAPGTSTEPSEGSAPGTSTEPSEGSAPGTSTEPSEGSAPGTSTEPSEGSAPGTSTEPSEGSAPGSPAGSPTSTEEGTSTEPSEGSAPGTSESATPESGPGSEPATSGSETPGTSESATPESGPGSEPATSGSETPGTSESATPESGPGTSTEPSEGSAPGTSESATPESGPGSPAGSPTSTEEGSPAGSPTSTEEGSPAGSPTSTEEGTSESATPESGPGTSTEPSEGSAPGFRVDEEFQSPFASQSRGYFLFRPRN

SEQ ID NO: 2117 - protein, 764 aa, Artificial Sequence
  Description of Artificial Sequence: Synthetic polypeptide
EESQKKLPSSRITCPQGSVAYGSYCYSLILIPQTWSNAELSCQMHFSGHLAFLLSTGEITFVSSLVKNSLTAYQYIWIGLHDPSHGTLPNGSGWKWSSSNVLTFYNWERNPSIAADRGYCAVLSQKSGFQKWRDFNCENELPYICKFKVGGSPAGSPTSTEEGTSESATPESGPGTSTEPSEGSAPGSPAGSPTSTEEGTSTEPSEGSAPGTSTEPSEGSAPGTSESATPESGPGSEPATSGSETPGSEPATSGSETPGSPAGSPTSTEEGTSESATPESGPGTSTEPSEGSAPGTSTEPSEGSAPGSPAGSPTSTEEGTSTEPSEGSAPGTSTEPSEGSAPGTSESATPESGPGTSTEPSEGSAPGTSESATPESGPGSEPATSGSETPGTSTEPSEGSAPGTSTEPSEGSAPGTSESATPESGPGTSESATPESGPGSPAGSPTSTEEGTSESATPESGPGSEPATSGSETPGTSESATPESGPGTSTEPSEGSAPGTSTEPSEGSAPGTSTEPSEGSAPGTSTEPSEGSAPGTSTEPSEGSAPGTSTEPSEGSAPGSPAGSPTSTEEGTSTEPSEGSAPGTSESATPESGPGSEPATSGSETPGTSESATPESGPGSEPATSGSETPGTSESATPESGPGTSTEPSEGSAPGTSESATPESGPGSPAGSPTSTEEGSPAGSPTSTEEGSPAGSPTSTEEGTSESATPESGPGTSTEPSEGSAPGHSQGTFTSDYSKYLDSRRAQDFVQWLMNTKRNRNNIA

SEQ ID NO: 2118 - protein, 764 aa, Artificial Sequence
  Description of Artificial Sequence: Synthetic polypeptide
EESQKKLPSSRITCPQGSVAYGSYCYSLILIPQTWSNAELSCQMHFSGHLAFLLSTGEITFVSSLVKNSLTAYQYIWIGLHDPSHGTLPNGSGWKWSSSNVLTFYNWERNPSIAADRGYCAVLSQKSGFQKWRDFNCENELPYICKFKVGGSPAGSPTSTEEGTSESATPESGPGTSTEPSEGSAPGSPAGSPTSTEEGTSTEPSEGSAPGTSTEPSEGSAPGTSESATPESGPGSEPATSGSETPGSEPATSGSETPGSPAGSPTSTEEGTSESATPESGPGTSTEPSEGSAPGTSTEPSEGSAPGSPAGSPTSTEEGTSTEPSEGSAPGTSTEPSEGSAPGTSESATPESGPGTSTEPSEGSAPGTSESATPESGPGSEPATSGSETPGTSTEPSEGSAPGTSTEPSEGSAPGTSESATPESGPGTSESATPESGPGSPAGSPTSTEEGTSESATPESGPGSEPATSGSETPGTSESATPESGPGTSTEPSEGSAPGTSTEPSEGSAPGTSTEPSEGSAPGTSTEPSEGSAPGTSTEPSEGSAPGTSTEPSEGSAPGSPAGSPTSTEEGTSTEPSEGSAPGTSESATPESGPGSEPATSGSETPGTSESATPESGPGSEPATSGSETPGTSESATPESGPGTSTEPSEGSAPGTSESATPESGPGSPAGSPTSTEEGSPAGSPTSTEEGSPAGSPTSTEEGTSESATPESGPGTSTEPSEGSAPGKCNTATCATNRLANFLVHSSNNFGPILPPTNVGSNTY

SEQ ID NO: 2119 - protein, 763 aa, Artificial Sequence
  Description of Artificial Sequence: Synthetic polypeptide
EESQKKLPSSRITCPQGSVAYGSYCYSLILIPQTWSNAELSCQMHFSGHLAFLLSTGEITFVSSLVKNSLTAYQYIWIGLHDPSHGTLPNGSGWKWSSSNVLTFYNWERNPSIAADRGYCAVLSQKSGFQKWRDFNCENELPYICKFKVGGSPAGSPTSTEEGTSESATPESGPGTSTEPSEGSAPGSPAGSPTSTEEGTSTEPSEGSAPGTSTEPSEGSAPGTSESATPESGPGSEPATSGSETPGSEPATSGSETPGSPAGSPTSTEEGTSESATPESGPGTSTEPSEGSAPGTSTEPSEGSAPGSPAGSPTSTEEGTSTEPSEGSAPGTSTEPSEGSAPGTSESATPESGPGTSTEPSEGSAPGTSESATPESGPGSEPATSGSETPGTSTEPSEGSAPGTSTEPSEGSAPGTSESATPESGPGTSESATPESGPGSPAGSPTSTEEGTSESATPESGPGSEPATSGSETPGTSESATPESGPGTSTEPSEGSAPGTSTEPSEGSAPGTSTEPSEGSAPGTSTEPSEGSAPGTSTEPSEGSAPGTSTEPSEGSAPGSPAGSPTSTEEGTSTEPSEGSAPGTSESATPESGPGSEPATSGSETPGTSESATPESGPGSEPATSGSETPGTSESATPESGPGTSTEPSEGSAPGTSESATPESGPGSPAGSPTSTEEGSPAGSPTSTEEGSPAGSPTSTEEGTSESATPESGPGTSTEPSEGSAPGYPIKPEAPGEDASPEELNRYYASLRHYLNLVTRQRY

SEQ ID NO: 2120 - protein, 768 aa, Artificial Sequence; identical to SEQ ID NO: 2076
  Description of Artificial Sequence: Synthetic polypeptide

SEQ ID NO: 2121 - protein, 765 aa, Artificial Sequence
  Description of Artificial Sequence: Synthetic polypeptide
EESQKKLPSSRITCPQGSVAYGSYCYSLILIPQTWSNAELSCQMHFSGHLAFLLSTGEITFVSSLVKNSLTAYQYIWIGLHDPSHGTLPNGSGWKWSSSNVLTFYNWERNPSIAADRGYCAVLSQKSGFQKWRDFNCENELPYICKFKVGGSPAGSPTSTEEGTSESATPESGPGTSTEPSEGSAPGSPAGSPTSTEEGTSTEPSEGSAPGTSTEPSEGSAPGTSESATPESGPGSEPATSGSETPGSEPATSGSETPGSPAGSPTSTEEGTSESATPESGPGTSTEPSEGSAPGTSTEPSEGSAPGSPAGSPTSTEEGTSTEPSEGSAPGTSTEPSEGSAPGTSESATPESGPGTSTEPSEGSAPGTSESATPESGPGSEPATSGSETPGTSTEPSEGSAPGTSTEPSEGSAPGTSESATPESGPGTSESATPESGPGSPAGSPTSTEEGTSESATPESGPGSEPATSGSETPGTSESATPESGPGTSTEPSEGSAPGTSTEPSEGSAPGTSTEPSEGSAPGTSTEPSEGSAPGTSTEPSEGSAPGTSTEPSEGSAPGSPAGSPTSTEEGTSTEPSEGSAPGTSESATPESGPGSEPATSGSETPGTSESATPESGPGSEPATSGSETPGTSESATPESGPGTSTEPSEGSAPGTSESATPESGPGSPAGSPTSTEEGSPAGSPTSTEEGSPAGSPTSTEEGTSESATPESGPGTSTEPSEGSAPGFTLSLDVPTNIMNLLFNIAKAKNLRAQAAANAHLMAQI

SEQ ID NO: 2122 - protein, 774 aa, Artificial Sequence
  Description of Artificial Sequence: Synthetic polypeptide
TQAQLLRVGCVLGTCQVQNLSHRLWQLMGPAGRQDSAPVDPSSPHSYGGSPAGSPTSTEEGTSESATPESGPGTSTEPSEGSAPGSPAGSPTSTEEGTSTEPSEGSAPGTSTEPSEGSAPGTSESATPESGPGSEPATSGSETPGSEPATSGSETPGSPAGSPTSTEEGTSESATPESGPGTSTEPSEGSAPGTSTEPSEGSAPGSPAGSPTSTEEGTSTEPSEGSAPGTSTEPSEGSAPGTSESATPESGPGTSTEPSEGSAPGTSESATPESGPGSEPATSGSETPGTSTEPSEGSAPGTSTEPSEGSAPGTSESATPESGPGTSESATPESGPGSPAGSPTSTEEGTSESATPESGPGSEPATSGSETPGTSESATPESGPGTSTEPSEGSAPGTSTEPSEGSAPGTSTEPSEGSAPGTSTEPSEGSAPGTSTEPSEGSAPGTSTEPSEGSAPGSPAGSPTSTEEGTSTEPSEGSAPGTSESATPESGPGSEPATSGSETPGTSESATPESGPGSEPATSGSETPGTSESATPESGPGTSTEPSEGSAPGTSESATPESGPGSPAGSPTSTEEGSPAGSPTSTEEGSPAGSPTSTEEGTSESATPESGPGTSTEPSEGSAPGEESQKKLPSSRITCPQGSVAYGSYCYSLILIPQTWSNAELSCQMHFSGHLAFLLSTGEITFVSSLVKNSLTAYQYIWIGLHDPSHGTLPNGSGWKWSSSNVLTFYNWERNPSIAADRGYCAVLSQKSGFQKWRDFNCENELPYICKFKV

SEQ ID NO: 2123 - protein, 873 aa, Artificial Sequence
  Description of Artificial Sequence: Synthetic polypeptide
VPIQKVQDDTKTLIKTIVTRINDISHTQSVSSKQKVTGLDFIPGLHPILTLSKMDQTLAVYQQILTSMPSRNVIQISNDLENLRDLLHVLAFSKSCHLPWASGLETLDSLGGVLEASGYSTEVVALSRLQGSLQDMLWQLDLSPGCGGSPAGSPTSTEEGTSESATPESGPGTSTEPSEGSAPGSPAGSPTSTEEGTSTEPSEGSAPGTSTEPSEGSAPGTSESATPESGPGSEPATSGSETPGSEPATSGSETPGSPAGSPTSTEEGTSESATPESGPGTSTEPSEGSAPGTSTEPSEGSAPGSPAGSPTSTEEGTSTEPSEGSAPGTSTEPSEGSAPGTSESATPESGPGTSTEPSEGSAPGTSESATPESGPGSEPATSGSETPGTSTEPSEGSAPGTSTEPSEGSAPGTSESATPESGPGTSESATPESGPGSPAGSPTSTEEGTSESATPESGPGSEPATSGSETPGTSESATPESGPGTSTEPSEGSAPGTSTEPSEGSAPGTSTEPSEGSAPGTSTEPSEGSAPGTSTEPSEGSAPGTSTEPSEGSAPGSPAGSPTSTEEGTSTEPSEGSAPGTSESATPESGPGSEPATSGSETPGTSESATPESGPGSEPATSGSETPGTSESATPESGPGTSTEPSEGSAPGTSESATPESGPGSPAGSPTSTEEGSPAGSPTSTEEGSPAGSPTSTEEGTSESATPESGPGTSTEPSEGSAPGEESQKKLPSSRITCPQGSVAYGSYCYSLILIPQTWSNAELSCQMHFSGHLAFLLSTGEITFVSSLVKNSLTAYQYIWIGLHDPSHGTLPNGSGWKWSSSNVLTFYNWERNPSIAADRGYCAVLSQKSGFQKWRDFNCENELPYICKFKV

SEQ ID NO: 2124 - protein, 752 aa, Artificial Sequence
  Description of Artificial Sequence: Synthetic polypeptide
FRVDEEFQSPFASQSRGYFLFRPRNGGSPAGSPTSTEEGTSESATPESGPGTSTEPSEGSAPGSPAGSPTSTEEGTSTEPSEGSAPGTSTEPSEGSAPGTSESATPESGPGSEPATSGSETPGSEPATSGSETPGSPAGSPTSTEEGTSESATPESGPGTSTEPSEGSAPGTSTEPSEGSAPGSPAGSPTSTEEGTSTEPSEGSAPGTSTEPSEGSAPGTSESATPESGPGTSTEPSEGSAPGTSESATPESGPGSEPATSGSETPGTSTEPSEGSAPGTSTEPSEGSAPGTSESATPESGPGTSESATPESGPGSPAGSPTSTEEGTSESATPESGPGSEPATSGSETPGTSESATPESGPGTSTEPSEGSAPGTSTEPSEGSAPGTSTEPSEGSAPGTSTEPSEGSAPGTSTEPSEGSAPGTSTEPSEGSAPGSPAGSPTSTEEGTSTEPSEGSAPGTSESATPESGPGSEPATSGSETPGTSESATPESGPGSEPATSGSETPGTSESATPESGPGTSTEPSEGSAPGTSESATPESGPGSPAGSPTSTEEGSPAGSPTSTEEGSPAGSPTSTEEGTSESATPESGPGTSTEPSEGSAPGEESQKKLPSSRITCPQGSVAYGSYCYSLILIPQTWSNAELSCQMHFSGHLAFLLSTGEITFVSSLVKNSLTAYQYIWIGLHDPSHGTLPNGSGWKWSSSNVLTFYNWERNPSIAADRGYCAVLSQKSGFQKWRDFNCENELPYICKFKV

SEQ ID NO: 2125 - protein, 764 aa, Artificial Sequence
  Description of Artificial Sequence: Synthetic polypeptide
HSQGTFTSDYSKYLDSRRAQDFVQWLMNTKRNRNNIAGGSPAGSPTSTEEGTSESATPESGPGTSTEPSEGSAPGSPAGSPTSTEEGTSTEPSEGSAPGTSTEPSEGSAPGTSESATPESGPGSEPATSGSETPGSEPATSGSETPGSPAGSPTSTEEGTSESATPESGPGTSTEPSEGSAPGTSTEPSEGSAPGSPAGSPTSTEEGTSTEPSEGSAPGTSTEPSEGSAPGTSESATPESGPGTSTEPSEGSAPGTSESATPESGPGSEPATSGSETPGTSTEPSEGSAPGTSTEPSEGSAPGTSESATPESGPGTSESATPESGPGSPAGSPTSTEEGTSESATPESGPGSEPATSGSETPGTSESATPESGPGTSTEPSEGSAPGTSTEPSEGSAPGTSTEPSEGSAPGTSTEPSEGSAPGTSTEPSEGSAPGTSTEPSEGSAPGSPAGSPTSTEEGTSTEPSEGSAPGTSESATPESGPGSEPATSGSETPGTSESATPESGPGSEPATSGSETPGTSESATPESGPGTSTEPSEGSAPGTSESATPESGPGSPAGSPTSTEEGSPAGSPTSTEEGSPAGSPTSTEEGTSESATPESGPGTSTEPSEGSAPGEESQKKLPSSRITCPQGSVAYGSYCYSLILIPQTWSNAELSCQMHFSGHLAFLLSTGEITFVSSLVKNSLTAYQYIWIGLHDPSHGTLPNGSGWKWSSSNVLTFYNWERNPSIAADRGYCAVLSQKSGFQKWRDFNCENELPYICKFKV

SEQ ID NO: 2126 - protein, 764 aa, Artificial Sequence
  Description of Artificial Sequence: Synthetic polypeptide
KCNTATCATNRLANFLVHSSNNFGPILPPTNVGSNTYGGSPAGSPTSTEEGTSESATPESGPGTSTEPSEGSAPGSPAGSPTSTEEGTSTEPSEGSAPGTSTEPSEGSAPGTSESATPESGPGSEPATSGSETPGSEPATSGSETPGSPAGSPTSTEEGTSESATPESGPGTSTEPSEGSAPGTSTEPSEGSAPGSPAGSPTSTEEGTSTEPSEGSAPGTSTEPSEGSAPGTSESATPESGPGTSTEPSEGSAPGTSESATPESGPGSEPATSGSETPGTSTEPSEGSAPGTSTEPSEGSAPGTSESATPESGPGTSESATPESGPGSPAGSPTSTEEGTSESATPESGPGSEPATSGSETPGTSESATPESGPGTSTEPSEGSAPGTSTEPSEGSAPGTSTEPSEGSAPGTSTEPSEGSAPGTSTEPSEGSAPGTSTEPSEGSAPGSPAGSPTSTEEGTSTEPSEGSAPGTSESATPESGPGSEPATSGSETPGTSESATPESGPGSEPATSGSETPGTSESATPESGPGTSTEPSEGSAPGTSESATPESGPGSPAGSPTSTEEGSPAGSPTSTEEGSPAGSPTSTEEGTSESATPESGPGTSTEPSEGSAPGEESQKKLPSSRITCPQGSVAYGSYCYSLILIPQTWSNAELSCQMHFSGHLAFLLSTGEITFVSSLVKNSLTAYQYIWIGLHDPSHGTLPNGSGWKWSSSNVLTFYNWERNPSIAADRGYCAVLSQKSGFQKWRDFNCENELPYICKFKV

SEQ ID NO: 2127 - protein, 763 aa, Artificial Sequence
  Description of Artificial Sequence: Synthetic polypeptide
YPIKPEAPGEDASPEELNRYYASLRHYLNLVTRQRYGGSPAGSPTSTEEGTSESATPESGPGTSTEPSEGSAPGSPAGSPTSTEEGTSTEPSEGSAPGTSTEPSEGSAPGTSESATPESGPGSEPATSGSETPGSEPATSGSETPGSPAGSPTSTEEGTSESATPESGPGTSTEPSEGSAPGTSTEPSEGSAPGSPAGSPTSTEEGTSTEPSEGSAPGTSTEPSEGSAPGTSESATPESGPGTSTEPSEGSAPGTSESATPESGPGSEPATSGSETPGTSTEPSEGSAPGTSTEPSEGSAPGTSESATPESGPGTSESATPESGPGSPAGSPTSTEEGTSESATPESGPGSEPATSGSETPGTSESATPESGPGTSTEPSEGSAPGTSTEPSEGSAPGTSTEPSEGSAPGTSTEPSEGSAPGTSTEPSEGSAPGTSTEPSEGSAPGSPAGSPTSTEEGTSTEPSEGSAPGTSESATPESGPGSEPATSGSETPGTSESATPESGPGSEPATSGSETPGTSESATPESGPGTSTEPSEGSAPGTSESATPESGPGSPAGSPTSTEEGSPAGSPTSTEEGSPAGSPTSTEEGTSESATPESGPGTSTEPSEGSAPGEESQKKLPSSRITCPQGSVAYGSYCYSLILIPQTWSNAELSCQMHFSGHLAFLLSTGEITFVSSLVKNSLTAYQYIWIGLHDPSHGTLPNGSGWKWSSSNVLTFYNWERNPSIAADRGYCAVLSQKSGFQKWRDFNCENELPYICKFKV

SEQ ID NO: 2128 - protein, 768 aa, Artificial Sequence
  Description of Artificial Sequence: Synthetic polypeptide
IVLSLDVPIGLLQILLEQARARAAREQATTNARILARVGHCGGSPAGSPTSTEEGTSESATPESGPGTSTEPSEGSAPGSPAGSPTSTEEGTSTEPSEGSAPGTSTEPSEGSAPGTSESATPESGPGSEPATSGSETPGSEPATSGSETPGSPAGSPTSTEEGTSESATPESGPGTSTEPSEGSAPGTSTEPSEGSAPGSPAGSPTSTEEGTSTEPSEGSAPGTSTEPSEGSAPGTSESATPESGPGTSTEPSEGSAPGTSESATPESGPGSEPATSGSETPGTSTEPSEGSAPGTSTEPSEGSAPGTSESATPESGPGTSESATPESGPGSPAGSPTSTEEGTSESATPESGPGSEPATSGSETPGTSESATPESGPGTSTEPSEGSAPGTSTEPSEGSAPGTSTEPSEGSAPGTSTEPSEGSAPGTSTEPSEGSAPGTSTEPSEGSAPGSPAGSPTSTEEGTSTEPSEGSAPGTSESATPESGPGSEPATSGSETPGTSESATPESGPGSEPATSGSETPGTSESATPESGPGTSTEPSEGSAPGTSESATPESGPGSPAGSPTSTEEGSPAGSPTSTEEGSPAGSPTSTEEGTSESATPESGPGTSTEPSEGSAPGEESQKKLPSSRITCPQGSVAYGSYCYSLILIPQTWSNAELSCQMHFSGHLAFLLSTGEITFVSSLVKNSLTAYQYIWIGLHDPSHGTLPNGSGWKWSSSNVLTFYNWERNPSIAADRGYCAVLSQKSGFQKWRDFNCENELPYICKFKV

SEQ ID NO: 2129 - protein, 765 aa, Artificial Sequence
  Description of Artificial Sequence: Synthetic polypeptide
FTLSLDVPTNIMNLLFNIAKAKNLRAQAAANAHLMAQIGGSPAGSPTSTEEGTSESATPESGPGTSTEPSEGSAPGSPAGSPTSTEEGTSTEPSEGSAPGTSTEPSEGSAPGTSESATPESGPGSEPATSGSETPGSEPATSGSETPGSPAGSPTSTEEGTSESATPESGPGTSTEPSEGSAPGTSTEPSEGSAPGSPAGSPTSTEEGTSTEPSEGSAPGTSTEPSEGSAPGTSESATPESGPGTSTEPSEGSAPGTSESATPESGPGSEPATSGSETPGTSTEPSEGSAPGTSTEPSEGSAPGTSESATPESGPGTSESATPESGPGSPAGSPTSTEEGTSESATPESGPGSEPATSGSETPGTSESATPESGPGTSTEPSEGSAPGTSTEPSEGSAPGTSTEPSEGSAPGTSTEPSEGSAPGTSTEPSEGSAPGTSTEPSEGSAPGSPAGSPTSTEEGTSTEPSEGSAPGTSESATPESGPGSEPATSGSETPGTSESATPESGPGSEPATSGSETPGTSESATPESGPGTSTEPSEGSAPGTSESATPESGPGSPAGSPTSTEEGSPAGSPTSTEEGSPAGSPTSTEEGTSESATPESGPGTSTEPSEGSAPGEESQKKLPSSRITCPQGSVAYGSYCYSLILIPQTWSNAELSCQMHFSGHLAFLLSTGEITFVSSLVKNSLTAYQYIWIGLHDPSHGTLPNGSGWKWSSSNVLTFYNWERNPSIAADRGYCAVLSQKSGFQKWRDFNCENELPYICKFKV

SEQ ID NO: 2130 - protein, 771 aa, Artificial Sequence
  Description of Artificial Sequence: Synthetic polypeptide
TQAQLLRVGCVLGTCQVQNLSHRLWQLMGPAGRQDSAPVDPSSPHSYGGSPAGSPTSTEEGTSESATPESGPGTSTEPSEGSAPGSPAGSPTSTEEGTSTEPSEGSAPGTSTEPSEGSAPGTSESATPESGPGSEPATSGSETPGSEPATSGSETPGSPAGSPTSTEEGTSESATPESGPGTSTEPSEGSAPGTSTEPSEGSAPGSPAGSPTSTEEGTSTEPSEGSAPGTSTEPSEGSAPGTSESATPESGPGTSTEPSEGSAPGTSESATPESGPGSEPATSGSETPGTSTEPSEGSAPGTSTEPSEGSAPGTSESATPESGPGTSESATPESGPGSPAGSPTSTEEGTSESATPESGPGSEPATSGSETPGTSESATPESGPGTSTEPSEGSAPGTSTEPSEGSAPGTSTEPSEGSAPGTSTEPSEGSAPGTSTEPSEGSAPGTSTEPSEGSAPGSPAGSPTSTEEGTSTEPSEGSAPGTSESATPESGPGSEPATSGSETPGTSESATPESGPGSEPATSGSETPGTSESATPESGPGTSTEPSEGSAPGTSESATPESGPGSPAGSPTSTEEGSPAGSPTSTEEGSPAGSPTSTEEGTSESATPESGPGTSTEPSEGSAPGVPIQKVQDDTKTLIKTIVTRINDISHTQSVSSKQKVTGLDFIPGLHPILTLSKMDQTLAVYQQILTSMPSRNVIQISNDLENLRDLLHVLAFSKSCHLPWASGLETLDSLGGVLEASGYSTEVVALSRLQGSLQDMLWQLDLSPGC

SEQ ID NO: 2131 - protein, 650 aa, Artificial Sequence
  Description of Artificial Sequence: Synthetic polypeptide
TQAQLLRVGCVLGTCQVQNLSHRLWQLMGPAGRQDSAPVDPSSPHSYGGSPAGSPTSTEEGTSESATPESGPGTSTEPSEGSAPGSPAGSPTSTEEGTSTEPSEGSAPGTSTEPSEGSAPGTSESATPESGPGSEPATSGSETPGSEPATSGSETPGSPAGSPTSTEEGTSESATPESGPGTSTEPSEGSAPGTSTEPSEGSAPGSPAGSPTSTEEGTSTEPSEGSAPGTSTEPSEGSAPGTSESATPESGPGTSTEPSEGSAPGTSESATPESGPGSEPATSGSETPGTSTEPSEGSAPGTSTEPSEGSAPGTSESATPESGPGTSESATPESGPGSPAGSPTSTEEGTSESATPESGPGSEPATSGSETPGTSESATPESGPGTSTEPSEGSAPGTSTEPSEGSAPGTSTEPSEGSAPGTSTEPSEGSAPGTSTEPSEGSAPGTSTEPSEGSAPGSPAGSPTSTEEGTSTEPSEGSAPGTSESATPESGPGSEPATSGSETPGTSESATPESGPGSEPATSGSETPGTSESATPESGPGTSTEPSEGSAPGTSESATPESGPGSPAGSPTSTEEGSPAGSPTSTEEGSPAGSPTSTEEGTSESATPESGPGTSTEPSEGSAPGFRVDEEFQSPFASQSRGYFLFRPRN

SEQ ID NO: 2132 - protein, 662 aa, Artificial Sequence
  Description of Artificial Sequence: Synthetic polypeptide
TQAQLLRVGCVLGTCQVQNLSHRLWQLMGPAGRQDSAPVDPSSPHSYGGSPAGSPTSTEEGTSESATPESGPGTSTEPSEGSAPGSPAGSPTSTEEGTSTEPSEGSAPGTSTEPSEGSAPGTSESATPESGPGSEPATSGSETPGSEPATSGSETPGSPAGSPTSTEEGTSESATPESGPGTSTEPSEGSAPGTSTEPSEGSAPGSPAGSPTSTEEGTSTEPSEGSAPGTSTEPSEGSAPGTSESATPESGPGTSTEPSEGSAPGTSESATPESGPGSEPATSGSETPGTSTEPSEGSAPGTSTEPSEGSAPGTSESATPESGPGTSESATPESGPGSPAGSPTSTEEGTSESATPESGPGSEPATSGSETPGTSESATPESGPGTSTEPSEGSAPGTSTEPSEGSAPGTSTEPSEGSAPGTSTEPSEGSAPGTSTEPSEGSAPGTSTEPSEGSAPGSPAGSPTSTEEGTSTEPSEGSAPGTSESATPESGPGSEPATSGSETPGTSESATPESGPGSEPATSGSETPGTSESATPESGPGTSTEPSEGSAPGTSESATPESGPGSPAGSPTSTEEGSPAGSPTSTEEGSPAGSPTSTEEGTSESATPESGPGTSTEPSEGSAPGHSQGTFTSDYSKYLDSRRAQDFVQWLMNTKRNRNNIA

SEQ ID NO: 2133 - protein, 662 aa, Artificial Sequence
  Description of Artificial Sequence: Synthetic polypeptide
TQAQLLRVGCVLGTCQVQNLSHRLWQLMGPAGRQDSAPVDPSSPHSYGGSPAGSPTSTEEGTSESATPESGPGTSTEPSEGSAPGSPAGSPTSTEEGTSTEPSEGSAPGTSTEPSEGSAPGTSESATPESGPGSEPATSGSETPGSEPATSGSETPGSPAGSPTSTEEGTSESATPESGPGTSTEPSEGSAPGTSTEPSEGSAPGSPAGSPTSTEEGTSTEPSEGSAPGTSTEPSEGSAPGTSESATPESGPGTSTEPSEGSAPGTSESATPESGPGSEPATSGSETPGTSTEPSEGSAPGTSTEPSEGSAPGTSESATPESGPGTSESATPESGPGSPAGSPTSTEEGTSESATPESGPGSEPATSGSETPGTSESATPESGPGTSTEPSEGSAPGTSTEPSEGSAPGTSTEPSEGSAPGTSTEPSEGSAPGTSTEPSEGSAPGTSTEPSEGSAPGSPAGSPTSTEEGTSTEPSEGSAPGTSESATPESGPGSEPATSGSETPGTSESATPESGPGSEPATSGSETPGTSESATPESGPGTSTEPSEGSAPGTSESATPESGPGSPAGSPTSTEEGSPAGSPTSTEEGSPAGSPTSTEEGTSESATPESGPGTSTEPSEGSAPGKCNTATCATNRLANFLVHSSNNFGPILPPTNVGSNTY

SEQ ID NO: 2134 - protein, 661 aa, Artificial Sequence
  Description of Artificial Sequence: Synthetic polypeptide
TQAQLLRVGCVLGTCQVQNLSHRLWQLMGPAGRQDSAPVDPSSPHSYGGSPAGSPTSTEEGTSESATPESGPGTSTEPSEGSAPGSPAGSPTSTEEGTSTEPSEGSAPGTSTEPSEGSAPGTSESATPESGPGSEPATSGSETPGSEPATSGSETPGSPAGSPTSTEEGTSESATPESGPGTSTEPSEGSAPGTSTEPSEGSAPGSPAGSPTSTEEGTSTEPSEGSAPGTSTEPSEGSAPGTSESATPESGPGTSTEPSEGSAPGTSESATPESGPGSEPATSGSETPGTSTEPSEGSAPGTSTEPSEGSAPGTSESATPESGPGTSESATPESGPGSPAGSPTSTEEGTSESATPESGPGSEPATSGSETPGTSESATPESGPGTSTEPSEGSAPGTSTEPSEGSAPGTSTEPSEGSAPGTSTEPSEGSAPGTSTEPSEGSAPGTSTEPSEGSAPGSPAGSPTSTEEGTSTEPSEGSAPGTSESATPESGPGSEPATSGSETPGTSESATPESGPGSEPATSGSETPGTSESATPESGPGTSTEPSEGSAPGTSESATPESGPGSPAGSPTSTEEGSPAGSPTSTEEGSPAGSPTSTEEGTSESATPESGPGTSTEPSEGSAPGYPIKPEAPGEDASPEELNRYYASLRHYLNLVTRQRY

SEQ ID NO: 2135 - protein, 666 aa, Artificial Sequence; identical to SEQ ID NO: 2077
  Description of Artificial Sequence: Synthetic polypeptide

SEQ ID NO: 2136 - protein, 663 aa, Artificial Sequence
  Description of Artificial Sequence: Synthetic polypeptide
TQAQLLRVGCVLGTCQVQNLSHRLWQLMGPAGRQDSAPVDPSSPHSYGGSPAGSPTSTEEGTSESATPESGPGTSTEPSEGSAPGSPAGSPTSTEEGTSTEPSEGSAPGTSTEPSEGSAPGTSESATPESGPGSEPATSGSETPGSEPATSGSETPGSPAGSPTSTEEGTSESATPESGPGTSTEPSEGSAPGTSTEPSEGSAPGSPAGSPTSTEEGTSTEPSEGSAPGTSTEPSEGSAPGTSESATPESGPGTSTEPSEGSAPGTSESATPESGPGSEPATSGSETPGTSTEPSEGSAPGTSTEPSEGSAPGTSESATPESGPGTSESATPESGPGSPAGSPTSTEEGTSESATPESGPGSEPATSGSETPGTSESATPESGPGTSTEPSEGSAPGTSTEPSEGSAPGTSTEPSEGSAPGTSTEPSEGSAPGTSTEPSEGSAPGTSTEPSEGSAPGSPAGSPTSTEEGTSTEPSEGSAPGTSESATPESGPGSEPATSGSETPGTSESATPESGPGSEPATSGSETPGTSESATPESGPGTSTEPSEGSAPGTSESATPESGPGSPAGSPTSTEEGSPAGSPTSTEEGSPAGSPTSTEEGTSESATPESGPGTSTEPSEGSAPGFTLSLDVPTNIMNLLFNIAKAKNLRAQAAANAHLMAQI

SEQ ID NO: 2137 - protein, 771 aa, Artificial Sequence; identical to SEQ ID NO: 1967
  Description of Artificial Sequence: Synthetic polypeptide

SEQ ID NO: 2138 - protein, 650 aa, Artificial Sequence
  Description of Artificial Sequence: Synthetic polypeptide
FRVDEEFQSPFASQSRGYFLFRPRNGGSPAGSPTSTEEGTSESATPESGPGTSTEPSEGSAPGSPAGSPTSTEEGTSTEPSEGSAPGTSTEPSEGSAPGTSESATPESGPGSEPATSGSETPGSEPATSGSETPGSPAGSPTSTEEGTSESATPESGPGTSTEPSEGSAPGTSTEPSEGSAPGSPAGSPTSTEEGTSTEPSEGSAPGTSTEPSEGSAPGTSESATPESGPGTSTEPSEGSAPGTSESATPESGPGSEPATSGSETPGTSTEPSEGSAPGTSTEPSEGSAPGTSESATPESGPGTSESATPESGPGSPAGSPTSTEEGTSESATPESGPGSEPATSGSETPGTSESATPESGPGTSTEPSEGSAPGTSTEPSEGSAPGTSTEPSEGSAPGTSTEPSEGSAPGTSTEPSEGSAPGTSTEPSEGSAPGSPAGSPTSTEEGTSTEPSEGSAPGTSESATPESGPGSEPATSGSETPGTSESATPESGPGSEPATSGSETPGTSESATPESGPGTSTEPSEGSAPGTSESATPESGPGSPAGSPTSTEEGSPAGSPTSTEEGSPAGSPTSTEEGTSESATPESGPGTSTEPSEGSAPGTQAQLLRVGCVLGTCQVQNLSHRLWQLMGPAGRQDSAPVDPSSPHSY

SEQ ID NO: 2139 - protein, 662 aa, Artificial Sequence
  Description of Artificial Sequence: Synthetic polypeptide
HSQGTFTSDYSKYLDSRRAQDFVQWLMNTKRNRNNIAGGSPAGSPTSTEEGTSESATPESGPGTSTEPSEGSAPGSPAGSPTSTEEGTSTEPSEGSAPGTSTEPSEGSAPGTSESATPESGPGSEPATSGSETPGSEPATSGSETPGSPAGSPTSTEEGTSESATPESGPGTSTEPSEGSAPGTSTEPSEGSAPGSPAGSPTSTEEGTSTEPSEGSAPGTSTEPSEGSAPGTSESATPESGPGTSTEPSEGSAPGTSESATPESGPGSEPATSGSETPGTSTEPSEGSAPGTSTEPSEGSAPGTSESATPESGPGTSESATPESGPGSPAGSPTSTEEGTSESATPESGPGSEPATSGSETPGTSESATPESGPGTSTEPSEGSAPGTSTEPSEGSAPGTSTEPSEGSAPGTSTEPSEGSAPGTSTEPSEGSAPGTSTEPSEGSAPGSPAGSPTSTEEGTSTEPSEGSAPGTSESATPESGPGSEPATSGSETPGTSESATPESGPGSEPATSGSETPGTSESATPESGPGTSTEPSEGSAPGTSESATPESGPGSPAGSPTSTEEGSPAGSPTSTEEGSPAGSPTSTEEGTSESATPESGPGTSTEPSEGSAPGTQAQLLRVGCVLGTCQVQNLSHRLWQLMGPAGRQDSAPVDPSSPHSY

SEQ ID NO: 2140 - protein, 662 aa, Artificial Sequence
  Description of Artificial Sequence: Synthetic polypeptide
KCNTATCATNRLANFLVHSSNNFGPILPPTNVGSNTYGGSPAGSPTSTEEGTSESATPESGPGTSTEPSEGSAPGSPAGSPTSTEEGTSTEPSEGSAPGTSTEPSEGSAPGTSESATPESGPGSEPATSGSETPGSEPATSGSETPGSPAGSPTSTEEGTSESATPESGPGTSTEPSEGSAPGTSTEPSEGSAPGSPAGSPTSTEEGTSTEPSEGSAPGTSTEPSEGSAPGTSESATPESGPGTSTEPSEGSAPGTSESATPESGPGSEPATSGSETPGTSTEPSEGSAPGTSTEPSEGSAPGTSESATPESGPGTSESATPESGPGSPAGSPTSTEEGTSESATPESGPGSEPATSGSETPGTSESATPESGPGTSTEPSEGSAPGTSTEPSEGSAPGTSTEPSEGSAPGTSTEPSEGSAPGTSTEPSEGSAPGTSTEPSEGSAPGSPAGSPTSTEEGTSTEPSEGSAPGTSESATPESGPGSEPATSGSETPGTSESATPESGPGSEPATSGSETPGTSESATPESGPGTSTEPSEGSAPGTSESATPESGPGSPAGSPTSTEEGSPAGSPTSTEEGSPAGSPTSTEEGTSESATPESGPGTSTEPSEGSAPGTQAQLLRVGCVLGTCQVQNLSHRLWQLMGPAGRQDSAPVDPSSPHSY

SEQ ID NO: 2141 - protein, 661 aa, Artificial Sequence
  Description of Artificial Sequence: Synthetic polypeptide
YPIKPEAPGEDASPEELNRYYASLRHYLNLVTRQRYGGSPAGSPTSTEEGTSESATPESGPGTSTEPSEGSAPGSPAGSPTSTEEGTSTEPSEGSAPGTSTEPSEGSAPGTSESATPESGPGSEPATSGSETPGSEPATSGSETPGSPAGSPTSTEEGTSESATPESGPGTSTEPSEGSAPGTSTEPSEGSAPGSPAGSPTSTEEGTSTEPSEGSAPGTSTEPSEGSAPGTSESATPESGPGTSTEPSEGSAPGTSESATPESGPGSEPATSGSETPGTSTEPSEGSAPGTSTEPSEGSAPGTSESATPESGPGTSESATPESGPGSPAGSPTSTEEGTSESATPESGPGSEPATSGSETPGTSESATPESGPGTSTEPSEGSAPGTSTEPSEGSAPGTSTEPSEGSAPGTSTEPSEGSAPGTSTEPSEGSAPGTSTEPSEGSAPGSPAGSPTSTEEGTSTEPSEGSAPGTSESATPESGPGSEPATSGSETPGTSESATPESGPGSEPATSGSETPGTSESATPESGPGTSTEPSEGSAPGTSESATPESGPGSPAGSPTSTEEGSPAGSPTSTEEGSPAGSPTSTEEGTSESATPESGPGTSTEPSEGSAPGTQAQLLRVGCVLGTCQVQNLSHRLWQLMGPAGRQDSAPVDPSSPHSY

SEQ ID NO: 2142 - protein, 666 aa, Artificial Sequence
  Description of Artificial Sequence: Synthetic polypeptide
IVLSLDVPIGLLQILLEQARARAAREQATTNARILARVGHCGGSPAGSPTSTEEGTSESATPESGPGTSTEPSEGSAPGSPAGSPTSTEEGTSTEPSEGSAPGTSTEPSEGSAPGTSESATPESGPGSEPATSGSETPGSEPATSGSETPGSPAGSPTSTEEGTSESATPESGPGTSTEPSEGSAPGTSTEPSEGSAPGSPAGSPTSTEEGTSTEPSEGSAPGTSTEPSEGSAPGTSESATPESGPGTSTEPSEGSAPGTSESATPESGPGSEPATSGSETPGTSTEPSEGSAPGTSTEPSEGSAPGTSESATPESGPGTSESATPESGPGSPAGSPTSTEEGTSESATPESGPGSEPATSGSETPGTSESATPESGPGTSTEPSEGSAPGTSTEPSEGSAPGTSTEPSEGSAPGTSTEPSEGSAPGTSTEPSEGSAPGTSTEPSEGSAPGSPAGSPTSTEEGTSTEPSEGSAPGTSESATPESGPGSEPATSGSETPGTSESATPESGPGSEPATSGSETPGTSESATPESGPGTSTEPSEGSAPGTSESATPESGPGSPAGSPTSTEEGSPAGSPTSTEEGSPAGSPTSTEEGTSESATPESGPGTSTEPSEGSAPGTQAQLLRVGCVLGTCQVQNLSHRLWQLMGPAGRQDSAPVDPSSPHSY

SEQ ID NO: 2143 - protein, 663 aa, Artificial Sequence
  Description of Artificial Sequence: Synthetic polypeptide
FTLSLDVPTNIMNLLFNIAKAKNLRAQAAANAHLMAQIGGSPAGSPTSTEEGTSESATPESGPGTSTEPSEGSAPGSPAGSPTSTEEGTSTEPSEGSAPGTSTEPSEGSAPGTSESATPESGPGSEPATSGSETPGSEPATSGSETPGSPAGSPTSTEEGTSESATPESGPGTSTEPSEGSAPGTSTEPSEGSAPGSPAGSPTSTEEGTSTEPSEGSAPGTSTEPSEGSAPGTSESATPESGPGTSTEPSEGSAPGTSESATPESGPGSEPATSGSETPGTSTEPSEGSAPGTSTEPSEGSAPGTSESATPESGPGTSESATPESGPGSPAGSPTSTEEGTSESATPESGPGSEPATSGSETPGTSESATPESGPGTSTEPSEGSAPGTSTEPSEGSAPGTSTEPSEGSAPGTSTEPSEGSAPGTSTEPSEGSAPGTSTEPSEGSAPGSPAGSPTSTEEGTSTEPSEGSAPGTSESATPESGPGSEPATSGSETPGTSESATPESGPGSEPATSGSETPGTSESATPESGPGTSTEPSEGSAPGTSESATPESGPGSPAGSPTSTEEGSPAGSPTSTEEGSPAGSPTSTEEGTSESATPESGPGTSTEPSEGSAPGTQAQLLRVGCVLGTCQVQNLSHRLWQLMGPAGRQDSAPVDPSSPHSY

SEQ ID NO: 2144 - protein, 749 aa, Artificial Sequence
  Description of Artificial Sequence: Synthetic polypeptide
VPIQKVQDDTKTLIKTIVTRINDISHTQSVSSKQKVTGLDFIPGLHPILTLSKMDQTLAVYQQILTSMPSRNVIQISNDLENLRDLLHVLAFSKSCHLPWASGLETLDSLGGVLEASGYSTEVVALSRLQGSLQDMLWQLDLSPGCGGSPAGSPTSTEEGTSESATPESGPGTSTEPSEGSAPGSPAGSPTSTEEGTSTEPSEGSAPGTSTEPSEGSAPGTSESATPESGPGSEPATSGSETPGSEPATSGSETPGSPAGSPTSTEEGTSESATPESGPGTSTEPSEGSAPGTSTEPSEGSAPGSPAGSPTSTEEGTSTEPSEGSAPGTSTEPSEGSAPGTSESATPESGPGTSTEPSEGSAPGTSESATPESGPGSEPATSGSETPGTSTEPSEGSAPGTSTEPSEGSAPGTSESATPESGPGTSESATPESGPGSPAGSPTSTEEGTSESATPESGPGSEPATSGSETPGTSESATPESGPGTSTEPSEGSAPGTSTEPSEGSAPGTSTEPSEGSAPGTSTEPSEGSAPGTSTEPSEGSAPGTSTEPSEGSAPGSPAGSPTSTEEGTSTEPSEGSAPGTSESATPESGPGSEPATSGSETPGTSESATPESGPGSEPATSGSETPGTSESATPESGPGTSTEPSEGSAPGTSESATPESGPGSPAGSPTSTEEGSPAGSPTSTEEGSPAGSPTSTEEGTSESATPESGPGTSTEPSEGSAPGFRVDEEFQSPFASQSRGYFLFRPRN

SEQ ID NO: 2145 - protein, 761 aa, Artificial Sequence
  Description of Artificial Sequence: Synthetic polypeptide
VPIQKVQDDTKTLIKTIVTRINDISHTQSVSSKQKVTGLDFIPGLHPILTLSKMDQTLAVYQQILTSMPSRNVIQISNDLENLRDLLHVLAFSKSCHLPWASGLETLDSLGGVLEASGYSTEVVALSRLQGSLQDMLWQLDLSPGCGGSPAGSPTSTEEGTSESATPESGPGTSTEPSEGSAPGSPAGSPTSTEEGTSTEPSEGSAPGTSTEPSEGSAPGTSESATPESGPGSEPATSGSETPGSEPATSGSETPGSPAGSPTSTEEGTSESATPESGPGTSTEPSEGSAPGTSTEPSEGSAPGSPAGSPTSTEEGTSTEPSEGSAPGTSTEPSEGSAPGTSESATPESGPGTSTEPSEGSAPGTSESATPESGPGSEPATSGSETPGTSTEPSEGSAPGTSTEPSEGSAPGTSESATPESGPGTSESATPESGPGSPAGSPTSTEEGTSESATPESGPGSEPATSGSETPGTSESATPESGPGTSTEPSEGSAPGTSTEPSEGSAPGTSTEPSEGSAPGTSTEPSEGSAPGTSTEPSEGSAPGTSTEPSEGSAPGSPAGSPTSTEEGTSTEPSEGSAPGTSESATPESGPGSEPATSGSETPGTSESATPESGPGSEPATSGSETPGTSESATPESGPGTSTEPSEGSAPGTSESATPESGPGSPAGSPTSTEEGSPAGSPTSTEEGSPAGSPTSTEEGTSESATPESGPGTSTEPSEGSAPGHSQGTFTSDYSKYLDSRRAQDFVQWLMNTKRNRNNIA

SEQ ID NO: 2146 - protein, 761 aa, Artificial Sequence
  Description of Artificial Sequence: Synthetic polypeptide
VPIQKVQDDTKTLIKTIVTRINDISHTQSVSSKQKVTGLDFIPGLHPILTLSKMDQTLAVYQQILTSMPSRNVIQISNDLENLRDLLHVLAFSKSCHLPWASGLETLDSLGGVLEASGYSTEVVALSRLQGSLQDMLWQLDLSPGCGGSPAGSPTSTEEGTSESATPESGPGTSTEPSEGSAPGSPAGSPTSTEEGTSTEPSEGSAPGTSTEPSEGSAPGTSESATPESGPGSEPATSGSETPGSEPATSGSETPGSPAGSPTSTEEGTSESATPESGPGTSTEPSEGSAPGTSTEPSEGSAPGSPAGSPTSTEEGTSTEPSEGSAPGTSTEPSEGSAPGTSESATPESGPGTSTEPSEGSAPGTSESATPESGPGSEPATSGSETPGTSTEPSEGSAPGTSTEPSEGSAPGTSESATPESGPGTSESATPESGPGSPAGSPTSTEEGTSESATPESGPGSEPATSGSETPGTSESATPESGPGTSTEPSEGSAPGTSTEPSEGSAPGTSTEPSEGSAPGTSTEPSEGSAPGTSTEPSEGSAPGTSTEPSEGSAPGSPAGSPTSTEEGTSTEPSEGSAPGTSESATPESGPGSEPATSGSETPGTSESATPESGPGSEPATSGSETPGTSESATPESGPGTSTEPSEGSAPGTSESATPESGPGSPAGSPTSTEEGSPAGSPTSTEEGSPAGSPTSTEEGTSESATPESGPGTSTEPSEGSAPGKCNTATCATNRLANFLVHSSNNFGPILPPTNVGSNTY

SEQ ID NO: 2147 - protein, 1049 aa, Artificial Sequence
  Description of Artificial Sequence: Synthetic polypeptide
VPIQKVQDDTKTLIKTIVTRINDISHTQSVSSKQKVTGLDFIPGLHPILTLSKMDQTLAVYQQILTSMPSRNVIQISNDLENLRDLLHVLAFSKSCHLPWASGLETLDSLGGVLEASGYSTEVVALSRLQGSLQDMLWQLDLSPGCGGSPAGSPTSTEEGTSESATPESGPGTSTEPSEGSAPGSPAGSPTSTEEGTSTEPSEGSAPGTSTEPSEGSAPGTSESATPESGPGSEPATSGSETPGSEPATSGSETPGSPAGSPTSTEEGTSESATPESGPGTSTEPSEGSAPGTSTEPSEGSAPGSPAGSPTSTEEGTSTEPSEGSAPGTSTEPSEGSAPGTSESATPESGPGTSTEPSEGSAPGTSESATPESGPGSEPATSGSETPGTSTEPSEGSAPGTSTEPSEGSAPGTSESATPESGPGTSESATPESGPGSPAGSPTSTEEGTSESATPESGPGSEPATSGSETPGTSESATPESGPGTSTEPSEGSAPGTSTEPSEGSAPGTSTEPSEGSAPGTSTEPSEGSAPGTSTEPSEGSAPGTSTEPSEGSAPGSPAGSPTSTEEGTSTEPSEGSAPGTSESATPESGPGSEPATSGSETPGTSESATPESGPGSEPATSGSETPGTSESATPESGPGTSTEPSEGSAPGTSESATPESGPGSPAGSPTSTEEGSPAGSPTSTEEGSPAGSPTSTEEGTSESATPESGPGTSTEPSEGSAPGTSESATPESGPGSEPATSGSETPGTSESATPESGPGSEPATSGSETPGTSESATPESGPGTSTEPSEGSAPGSPAGSPTSTEEGTSESATPESGPGSEPATSGSETPGTSESATPESGPGSPAGSPTSTEEGSPAGSPTSTEEGTSTEPSEGSAPGTSESATPESGPGTSESATPESGPGTSESATPESGPGSEPATSGSETPGSEPATSGSETPGSPAGSPTSTEEGTSTEPSEGSAPGTSTEPSEGSAPGSEPATSGSETPGTSESATPESGPGTSTEPSEGSAPGKCNTATCATNRLANFLVHSSNNFGPILPPTNVGSNTY

SEQ ID NO: 2148 - protein, 1049 aa, Artificial Sequence
  Description of Artificial Sequence: Synthetic polypeptide
KCNTATCATNRLANFLVHSSNNFGPILPPTNVGSNTYGGSPAGSPTSTEEGTSESATPESGPGTSTEPSEGSAPGSPAGSPTSTEEGTSTEPSEGSAPGTSTEPSEGSAPGTSESATPESGPGSEPATSGSETPGSEPATSGSETPGSPAGSPTSTEEGTSESATPESGPGTSTEPSEGSAPGTSTEPSEGSAPGSPAGSPTSTEEGTSTEPSEGSAPGTSTEPSEGSAPGTSESATPESGPGTSTEPSEGSAPGTSESATPESGPGSEPATSGSETPGTSTEPSEGSAPGTSTEPSEGSAPGTSESATPESGPGTSESATPESGPGSPAGSPTSTEEGTSESATPESGPGSEPATSGSETPGTSESATPESGPGTSTEPSEGSAPGTSTEPSEGSAPGTSTEPSEGSAPGTSTEPSEGSAPGTSTEPSEGSAPGTSTEPSEGSAPGSPAGSPTSTEEGTSTEPSEGSAPGTSESATPESGPGSEPATSGSETPGTSESATPESGPGSEPATSGSETPGTSESATPESGPGTSTEPSEGSAPGTSESATPESGPGSPAGSPTSTEEGSPAGSPTSTEEGSPAGSPTSTEEGTSESATPESGPGTSTEPSEGSAPGTSESATPESGPGSEPATSGSETPGTSESATPESGPGSEPATSGSETPGTSESATPESGPGTSTEPSEGSAPGSPAGSPTSTEEGTSESATPESGPGSEPATSGSETPGTSESATPESGPGSPAGSPTSTEEGSPAGSPTSTEEGTSTEPSEGSAPGTSESATPESGPGTSESATPESGPGTSESATPESGPGSEPATSGSETPGSEPATSGSETPGSPAGSPTSTEEGTSTEPSEGSAPGTSTEPSEGSAPGSEPATSGSETPGTSESATPESGPGTSTEPSEGSAPGVPIQKVQDDTKTLIKTIVTRINDISHTQSVSSKQKVTGLDFIPGLHPILTLSKMDQTLAVYQQILTSMPSRNVIQISNDLENLRDLLHVLAFSKSCHLPWASGLETLDSLGGVLEASGYSTEVVALSRLQGSLQDMLWQLDLSPGC

SEQ ID NO: 2149 - protein, 760 aa, Artificial Sequence
  Description of Artificial Sequence: Synthetic polypeptide
VPIQKVQDDTKTLIKTIVTRINDISHTQSVSSKQKVTGLDFIPGLHPILTLSKMDQTLAVYQQILTSMPSRNVIQISNDLENLRDLLHVLAFSKSCHLPWASGLETLDSLGGVLEASGYSTEVVALSRLQGSLQDMLWQLDLSPGCGGSPAGSPTSTEEGTSESATPESGPGTSTEPSEGSAPGSPAGSPTSTEEGTSTEPSEGSAPGTSTEPSEGSAPGTSESATPESGPGSEPATSGSETPGSEPATSGSETPGSPAGSPTSTEEGTSESATPESGPGTSTEPSEGSAPGTSTEPSEGSAPGSPAGSPTSTEEGTSTEPSEGSAPGTSTEPSEGSAPGTSESATPESGPGTSTEPSEGSAPGTSESATPESGPGSEPATSGSETPGTSTEPSEGSAPGTSTEPSEGSAPGTSESATPESGPGTSESATPESGPGSPAGSPTSTEEGTSESATPESGPGSEPATSGSETPGTSESATPESGPGTSTEPSEGSAPGTSTEPSEGSAPGTSTEPSEGSAPGTSTEPSEGSAPGTSTEPSEGSAPGTSTEPSEGSAPGSPAGSPTSTEEGTSTEPSEGSAPGTSESATPESGPGSEPATSGSETPGTSESATPESGPGSEPATSGSETPGTSESATPESGPGTSTEPSEGSAPGTSESATPESGPGSPAGSPTSTEEGSPAGSPTSTEEGSPAGSPTSTEEGTSESATPESGPGTSTEPSEGSAPGYPIKPEAPGEDASPEELNRYYASLRHYLNLVTRQRY

SEQ ID NO: 2150 - protein, 765 aa, Artificial Sequence; identical to SEQ ID NO: 2078
  Description of Artificial Sequence: Synthetic polypeptide

SEQ ID NO: 2151 - protein, 762 aa, Artificial Sequence
  Description of Artificial Sequence: Synthetic polypeptide
VPIQKVQDDTKTLIKTIVTRINDISHTQSVSSKQKVTGLDFIPGLHPILTLSKMDQTLAVYQQILTSMPSRNVIQISNDLENLRDLLHVLAFSKSCHLPWASGLETLDSLGGVLEASGYSTEVVALSRLQGSLQDMLWQLDLSPGCGGSPAGSPTSTEEGTSESATPESGPGTSTEPSEGSAPGSPAGSPTSTEEGTSTEPSEGSAPGTSTEPSEGSAPGTSESATPESGPGSEPATSGSETPGSEPATSGSETPGSPAGSPTSTEEGTSESATPESGPGTSTEPSEGSAPGTSTEPSEGSAPGSPAGSPTSTEEGTSTEPSEGSAPGTSTEPSEGSAPGTSESATPESGPGTSTEPSEGSAPGTSESATPESGPGSEPATSGSETPGTSTEPSEGSAPGTSTEPSEGSAPGTSESATPESGPGTSESATPESGPGSPAGSPTSTEEGTSESATPESGPGSEPATSGSETPGTSESATPESGPGTSTEPSEGSAPGTSTEPSEGSAPGTSTEPSEGSAPGTSTEPSEGSAPGTSTEPSEGSAPGTSTEPSEGSAPGSPAGSPTSTEEGTSTEPSEGSAPGTSESATPESGPGSEPATSGSETPGTSESATPESGPGSEPATSGSETPGTSESATPESGPGTSTEPSEGSAPGTSESATPESGPGSPAGSPTSTEEGSPAGSPTSTEEGSPAGSPTSTEEGTSESATPESGPGTSTEPSEGSAPGFTLSLDVPTNIMNLLFNIAKAKNLRAQAAANAHLMAQI

SEQ ID NO: 2152 - protein, 749 aa, Artificial Sequence
  Description of Artificial Sequence: Synthetic polypeptide
FRVDEEFQSPFASQSRGYFLFRPRNGGSPAGSPTSTEEGTSESATPESGPGTSTEPSEGSAPGSPAGSPTSTEEGTSTEPSEGSAPGTSTEPSEGSAPGTSESATPESGPGSEPATSGSETPGSEPATSGSETPGSPAGSPTSTEEGTSESATPESGPGTSTEPSEGSAPGTSTEPSEGSAPGSPAGSPTSTEEGTSTEPSEGSAPGTSTEPSEGSAPGTSESATPESGPGTSTEPSEGSAPGTSESATPESGPGSEPATSGSETPGTSTEPSEGSAPGTSTEPSEGSAPGTSESATPESGPGTSESATPESGPGSPAGSPTSTEEGTSESATPESGPGSEPATSGSETPGTSESATPESGPGTSTEPSEGSAPGTSTEPSEGSAPGTSTEPSEGSAPGTSTEPSEGSAPGTSTEPSEGSAPGTSTEPSEGSAPGSPAGSPTSTEEGTSTEPSEGSAPGTSESATPESGPGSEPATSGSETPGTSESATPESGPGSEPATSGSETPGTSESATPESGPGTSTEPSEGSAPGTSESATPESGPGSPAGSPTSTEEGSPAGSPTSTEEGSPAGSPTSTEEGTSESATPESGPGTSTEPSEGSAPGVPIQKVQDDTKTLIKTIVTRINDISHTQSVSSKQKVTGLDFIPGLHPILTLSKMDQTLAVYQQILTSMPSRNVIQISNDLENLRDLLHVLAFSKSCHLPWASGLETLDSLGGVLEASGYSTEVVALSRLQGSLQDMLWQLDLSPGC

SEQ ID NO: 2153 - protein, 761 aa, Artificial Sequence
  Description of Artificial Sequence: Synthetic polypeptide
HSQGTFTSDYSKYLDSRRAQDFVQWLMNTKRNRNNIAGGSPAGSPTSTEEGTSESATPESGPGTSTEPSEGSAPGSPAGSPTSTEEGTSTEPSEGSAPGTSTEPSEGSAPGTSESATPESGPGSEPATSGSETPGSEPATSGSETPGSPAGSPTSTEEGTSESATPESGPGTSTEPSEGSAPGTSTEPSEGSAPGSPAGSPTSTEEGTSTEPSEGSAPGTSTEPSEGSAPGTSESATPESGPGTSTEPSEGSAPGTSESATPESGPGSEPATSGSETPGTSTEPSEGSAPGTSTEPSEGSAPGTSESATPESGPGTSESATPESGPGSPAGSPTSTEEGTSESATPESGPGSEPATSGSETPGTSESATPESGPGTSTEPSEGSAPGTSTEPSEGSAPGTSTEPSEGSAPGTSTEPSEGSAPGTSTEPSEGSAPGTSTEPSEGSAPGSPAGSPTSTEEGTSTEPSEGSAPGTSESATPESGPGSEPATSGSETPGTSESATPESGPGSEPATSGSETPGTSESATPESGPGTSTEPSEGSAPGTSESATPESGPGSPAGSPTSTEEGSPAGSPTSTEEGSPAGSPTSTEEGTSESATPESGPGTSTEPSEGSAPGVPIQKVQDDTKTLIKTIVTRINDISHTQSVSSKQKVTGLDFIPGLHPILTLSKMDQTLAVYQQILTSMPSRNVIQISNDLENLRDLLHVLAFSKSCHLPWASGLETLDSLGGVLEASGYSTEVVALSRLQGSLQDMLWQLDLSPGC

SEQ ID NO: 2154 - protein, 761 aa, Artificial Sequence
  Description of Artificial Sequence: Synthetic polypeptide
KCNTATCATNRLANFLVHSSNNFGPILPPTNVGSNTYGGSPAGSPTSTEEGTSESATPESGPGTSTEPSEGSAPGSPAGSPTSTEEGTSTEPSEGSAPGTSTEPSEGSAPGTSESATPESGPGSEPATSGSETPGSEPATSGSETPGSPAGSPTSTEEGTSESATPESGPGTSTEPSEGSAPGTSTEPSEGSAPGSPAGSPTSTEEGTSTEPSEGSAPGTSTEPSEGSAPGTSESATPESGPGTSTEPSEGSAPGTSESATPESGPGSEPATSGSETPGTSTEPSEGSAPGTSTEPSEGSAPGTSESATPESGPGTSESATPESGPGSPAGSPTSTEEGTSESATPESGPGSEPATSGSETPGTSESATPESGPGTSTEPSEGSAPGTSTEPSEGSAPGTSTEPSEGSAPGTSTEPSEGSAPGTSTEPSEGSAPGTSTEPSEGSAPGSPAGSPTSTEEGTSTEPSEGSAPGTSESATPESGPGSEPATSGSETPGTSESATPESGPGSEPATSGSETPGTSESATPESGPGTSTEPSEGSAPGTSESATPESGPGSPAGSPTSTEEGSPAGSPTSTEEGSPAGSPTSTEEGTSESATPESGPGTSTEPSEGSAPGVPIQKVQDDTKTLIKTIVTRINDISHTQSVSSKQKVTGLDFIPGLHPILTLSKMDQTLAVYQQILTSMPSRNVIQISNDLENLRDLLHVLAFSKSCHLPWASGLETLDSLGGVLEASGYSTEVVALSRLQGSLQDMLWQLDLSPGC

SEQ ID NO: 2155 - protein, 760 aa, Artificial Sequence
  Description of Artificial Sequence: Synthetic polypeptide
YPIKPEAPGEDASPEELNRYYASLRHYLNLVTRQRYGGSPAGSPTSTEEGTSESATPESGPGTSTEPSEGSAPGSPAGSPTSTEEGTSTEPSEGSAPGTSTEPSEGSAPGTSESATPESGPGSEPATSGSETPGSEPATSGSETPGSPAGSPTSTEEGTSESATPESGPGTSTEPSEGSAPGTSTEPSEGSAPGSPAGSPTSTEEGTSTEPSEGSAPGTSTEPSEGSAPGTSESATPESGPGTSTEPSEGSAPGTSESATPESGPGSEPATSGSETPGTSTEPSEGSAPGTSTEPSEGSAPGTSESATPESGPGTSESATPESGPGSPAGSPTSTEEGTSESATPESGPGSEPATSGSETPGTSESATPESGPGTSTEPSEGSAPGTSTEPSEGSAPGTSTEPSEGSAPGTSTEPSEGSAPGTSTEPSEGSAPGTSTEPSEGSAPGSPAGSPTSTEEGTSTEPSEGSAPGTSESATPESGPGSEPATSGSETPGTSESATPESGPGSEPATSGSETPGTSESATPESGPGTSTEPSEGSAPGTSESATPESGPGSPAGSPTSTEEGSPAGSPTSTEEGSPAGSPTSTEEGTSESATPESGPGTSTEPSEGSAPGVPIQKVQDDTKTLIKTIVTRINDISHTQSVSSKQKVTGLDFIPGLHPILTLSKMDQTLAVYQQILTSMPSRNVIQISNDLENLRDLLHVLAFSKSCHLPWASGLETLDSLGGVLEASGYSTEVVALSRLQGSLQDMLWQLDLSPGC

SEQ ID NO: 2156 - protein, 765 aa, Artificial Sequence
  Description of Artificial Sequence: Synthetic polypeptide
IVLSLDVPIGLLQILLEQARARAAREQATTNARILARVGHCGGSPAGSPTSTEEGTSESATPESGPGTSTEPSEGSAPGSPAGSPTSTEEGTSTEPSEGSAPGTSTEPSEGSAPGTSESATPESGPGSEPATSGSETPGSEPATSGSETPGSPAGSPTSTEEGTSESATPESGPGTSTEPSEGSAPGTSTEPSEGSAPGSPAGSPTSTEEGTSTEPSEGSAPGTSTEPSEGSAPGTSESATPESGPGTSTEPSEGSAPGTSESATPESGPGSEPATSGSETPGTSTEPSEGSAPGTSTEPSEGSAPGTSESATPESGPGTSESATPESGPGSPAGSPTSTEEGTSESATPESGPGSEPATSGSETPGTSESATPESGPGTSTEPSEGSAPGTSTEPSEGSAPGTSTEPSEGSAPGTSTEPSEGSAPGTSTEPSEGSAPGTSTEPSEGSAPGSPAGSPTSTEEGTSTEPSEGSAPGTSESATPESGPGSEPATSGSETPGTSESATPESGPGSEPATSGSETPGTSESATPESGPGTSTEPSEGSAPGTSESATPESGPGSPAGSPTSTEEGSPAGSPTSTEEGSPAGSPTSTEEGTSESATPESGPGTSTEPSEGSAPGVPIQKVQDDTKTLIKTIVTRINDISHTQSVSSKQKVTGLDFIPGLHPILTLSKMDQTLAVYQQILTSMPSRNVIQISNDLENLRDLLHVLAFSKSCHLPWASGLETLDSLGGVLEASGYSTEVVALSRLQGSLQDMLWQLDLSPGC

SEQ ID NO: 2157 - protein, 762 aa, Artificial Sequence
  Description of Artificial Sequence: Synthetic polypeptide
FTLSLDVPTNIMNLLFNIAKAKNLRAQAAANAHLMAQIGGSPAGSPTSTEEGTSESATPESGPGTSTEPSEGSAPGSPAGSPTSTEEGTSTEPSEGSAPGTSTEPSEGSAPGTSESATPESGPGSEPATSGSETPGSEPATSGSETPGSPAGSPTSTEEGTSESATPESGPGTSTEPSEGSAPGTSTEPSEGSAPGSPAGSPTSTEEGTSTEPSEGSAPGTSTEPSEGSAPGTSESATPESGPGTSTEPSEGSAPGTSESATPESGPGSEPATSGSETPGTSTEPSEGSAPGTSTEPSEGSAPGTSESATPESGPGTSESATPESGPGSPAGSPTSTEEGTSESATPESGPGSEPATSGSETPGTSESATPESGPGTSTEPSEGSAPGTSTEPSEGSAPGTSTEPSEGSAPGTSTEPSEGSAPGTSTEPSEGSAPGTSTEPSEGSAPGSPAGSPTSTEEGTSTEPSEGSAPGTSESATPESGPGSEPATSGSETPGTSESATPESGPGSEPATSGSETPGTSESATPESGPGTSTEPSEGSAPGTSESATPESGPGSPAGSPTSTEEGSPAGSPTSTEEGSPAGSPTSTEEGTSESATPESGPGTSTEPSEGSAPGVPIQKVQDDTKTLIKTIVTRINDISHTQSVSSKQKVTGLDFIPGLHPILTLSKMDQTLAVYQQILTSMPSRNVIQISNDLENLRDLLHVLAFSKSCHLPWASGLETLDSLGGVLEASGYSTEVVALSRLQGSLQDMLWQLDLSPGC

SEQ ID NO: 2158 - protein, 640 aa, Artificial Sequence
  Description of Artificial Sequence: Synthetic polypeptide
FRVDEEFQSPFASQSRGYFLFRPRNGGSPAGSPTSTEEGTSESATPESGPGTSTEPSEGSAPGSPAGSPTSTEEGTSTEPSEGSAPGTSTEPSEGSAPGTSESATPESGPGSEPATSGSETPGSEPATSGSETPGSPAGSPTSTEEGTSESATPESGPGTSTEPSEGSAPGTSTEPSEGSAPGSPAGSPTSTEEGTSTEPSEGSAPGTSTEPSEGSAPGTSESATPESGPGTSTEPSEGSAPGTSESATPESGPGSEPATSGSETPGTSTEPSEGSAPGTSTEPSEGSAPGTSESATPESGPGTSESATPESGPGSPAGSPTSTEEGTSESATPESGPGSEPATSGSETPGTSESATPESGPGTSTEPSEGSAPGTSTEPSEGSAPGTSTEPSEGSAPGTSTEPSEGSAPGTSTEPSEGSAPGTSTEPSEGSAPGSPAGSPTSTEEGTSTEPSEGSAPGTSESATPESGPGSEPATSGSETPGTSESATPESGPGSEPATSGSETPGTSESATPESGPGTSTEPSEGSAPGTSESATPESGPGSPAGSPTSTEEGSPAGSPTSTEEGSPAGSPTSTEEGTSESATPESGPGTSTEPSEGSAPGHSQGTFTSDYSKYLDSRRAQDFVQWLMNTKRNRNNIA

SEQ ID NO: 2159 - protein, 640 aa, Artificial Sequence
  Description of Artificial Sequence: Synthetic polypeptide
FRVDEEFQSPFASQSRGYFLFRPRNGGSPAGSPTSTEEGTSESATPESGPGTSTEPSEGSAPGSPAGSPTSTEEGTSTEPSEGSAPGTSTEPSEGSAPGTSESATPESGPGSEPATSGSETPGSEPATSGSETPGSPAGSPTSTEEGTSESATPESGPGTSTEPSEGSAPGTSTEPSEGSAPGSPAGSPTSTEEGTSTEPSEGSAPGTSTEPSEGSAPGTSESATPESGPGTSTEPSEGSAPGTSESATPESGPGSEPATSGSETPGTSTEPSEGSAPGTSTEPSEGSAPGTSESATPESGPGTSESATPESGPGSPAGSPTSTEEGTSESATPESGPGSEPATSGSETPGTSESATPESGPGTSTEPSEGSAPGTSTEPSEGSAPGTSTEPSEGSAPGTSTEPSEGSAPGTSTEPSEGSAPGTSTEPSEGSAPGSPAGSPTSTEEGTSTEPSEGSAPGTSESATPESGPGSEPATSGSETPGTSESATPESGPGSEPATSGSETPGTSESATPESGPGTSTEPSEGSAPGTSESATPESGPGSPAGSPTSTEEGSPAGSPTSTEEGSPAGSPTSTEEGTSESATPESGPGTSTEPSEGSAPGKCNTATCATNRLANFLVHSSNNFGPILPPTNVGSNTY

SEQ ID NO: 2160 - protein, 639 aa, Artificial Sequence
  Description of Artificial Sequence: Synthetic polypeptide
FRVDEEFQSPFASQSRGYFLFRPRNGGSPAGSPTSTEEGTSESATPESGPGTSTEPSEGSAPGSPAGSPTSTEEGTSTEPSEGSAPGTSTEPSEGSAPGTSESATPESGPGSEPATSGSETPGSEPATSGSETPGSPAGSPTSTEEGTSESATPESGPGTSTEPSEGSAPGTSTEPSEGSAPGSPAGSPTSTEEGTSTEPSEGSAPGTSTEPSEGSAPGTSESATPESGPGTSTEPSEGSAPGTSESATPESGPGSEPATSGSETPGTSTEPSEGSAPGTSTEPSEGSAPGTSESATPESGPGTSESATPESGPGSPAGSPTSTEEGTSESATPESGPGSEPATSGSETPGTSESATPESGPGTSTEPSEGSAPGTSTEPSEGSAPGTSTEPSEGSAPGTSTEPSEGSAPGTSTEPSEGSAPGTSTEPSEGSAPGSPAGSPTSTEEGTSTEPSEGSAPGTSESATPESGPGSEPATSGSETPGTSESATPESGPGSEPATSGSETPGTSESATPESGPGTSTEPSEGSAPGTSESATPESGPGSPAGSPTSTEEGSPAGSPTSTEEGSPAGSPTSTEEGTSESATPESGPGTSTEPSEGSAPGYPIKPEAPGEDASPEELNRYYASLRHYLNLVTRQRY

SEQ ID NO: 2161 - protein, 644 aa, Artificial Sequence
  Description of Artificial Sequence: Synthetic polypeptide
FRVDEEFQSPFASQSRGYFLFRPRNGGSPAGSPTSTEEGTSESATPESGPGTSTEPSEGSAPGSPAGSPTSTEEGTSTEPSEGSAPGTSTEPSEGSAPGTSESATPESGPGSEPATSGSETPGSEPATSGSETPGSPAGSPTSTEEGTSESATPESGPGTSTEPSEGSAPGTSTEPSEGSAPGSPAGSPTSTEEGTSTEPSEGSAPGTSTEPSEGSAPGTSESATPESGPGTSTEPSEGSAPGTSESATPESGPGSEPATSGSETPGTSTEPSEGSAPGTSTEPSEGSAPGTSESATPESGPGTSESATPESGPGSPAGSPTSTEEGTSESATPESGPGSEPATSGSETPGTSESATPESGPGTSTEPSEGSAPGTSTEPSEGSAPGTSTEPSEGSAPGTSTEPSEGSAPGTSTEPSEGSAPGTSTEPSEGSAPGSPAGSPTSTEEGTSTEPSEGSAPGTSESATPESGPGSEPATSGSETPGTSESATPESGPGSEPATSGSETPGTSESATPESGPGTSTEPSEGSAPGTSESATPESGPGSPAGSPTSTEEGSPAGSPTSTEEGSPAGSPTSTEEGTSESATPESGPGTSTEPSEGSAPGIVLSLDVPIGLLQILLEQARARAAREQATTNARILARVGHC

SEQ ID NO: 2162 - protein, 641 aa, Artificial Sequence
  Description of Artificial Sequence: Synthetic polypeptide
FRVDEEFQSPFASQSRGYFLFRPRNGGSPAGSPTSTEEGTSESATPESGPGTSTEPSEGSAPGSPAGSPTSTEEGTSTEPSEGSAPGTSTEPSEGSAPGTSESATPESGPGSEPATSGSETPGSEPATSGSETPGSPAGSPTSTEEGTSESATPESGPGTSTEPSEGSAPGTSTEPSEGSAPGSPAGSPTSTEEGTSTEPSEGSAPGTSTEPSEGSAPGTSESATPESGPGTSTEPSEGSAPGTSESATPESGPGSEPATSGSETPGTSTEPSEGSAPGTSTEPSEGSAPGTSESATPESGPGTSESATPESGPGSPAGSPTSTEEGTSESATPESGPGSEPATSGSETPGTSESATPESGPGTSTEPSEGSAPGTSTEPSEGSAPGTSTEPSEGSAPGTSTEPSEGSAPGTSTEPSEGSAPGTSTEPSEGSAPGSPAGSPTSTEEGTSTEPSEGSAPGTSESATPESGPGSEPATSGSETPGTSESATPESGPGSEPATSGSETPGTSESATPESGPGTSTEPSEGSAPGTSESATPESGPGSPAGSPTSTEEGSPAGSPTSTEEGSPAGSPTSTEEGTSESATPESGPGTSTEPSEGSAPGFTLSLDVPTNIMNLLFNIAKAKNLRAQAAANAHLMAQI

SEQ ID NO: 2163 - protein, 640 aa, Artificial Sequence
  Description of Artificial Sequence: Synthetic polypeptide
HSQGTFTSDYSKYLDSRRAQDFVQWLMNTKRNRNNIAGGSPAGSPTSTEEGTSESATPESGPGTSTEPSEGSAPGSPAGSPTSTEEGTSTEPSEGSAPGTSTEPSEGSAPGTSESATPESGPGSEPATSGSETPGSEPATSGSETPGSPAGSPTSTEEGTSESATPESGPGTSTEPSEGSAPGTSTEPSEGSAPGSPAGSPTSTEEGTSTEPSEGSAPGTSTEPSEGSAPGTSESATPESGPGTSTEPSEGSAPGTSESATPESGPGSEPATSGSETPGTSTEPSEGSAPGTSTEPSEGSAPGTSESATPESGPGTSESATPESGPGSPAGSPTSTEEGTSESATPESGPGSEPATSGSETPGTSESATPESGPGTSTEPSEGSAPGTSTEPSEGSAPGTSTEPSEGSAPGTSTEPSEGSAPGTSTEPSEGSAPGTSTEPSEGSAPGSPAGSPTSTEEGTSTEPSEGSAPGTSESATPESGPGSEPATSGSETPGTSESATPESGPGSEPATSGSETPGTSESATPESGPGTSTEPSEGSAPGTSESATPESGPGSPAGSPTSTEEGSPAGSPTSTEEGSPAGSPTSTEEGTSESATPESGPGTSTEPSEGSAPGFRVDEEFQSPFASQSRGYFLFRPRN

SEQ ID NO: 2164 - protein, 640 aa, Artificial Sequence
  Description of Artificial Sequence: Synthetic polypeptide
KCNTATCATNRLANFLVHSSNNFGPILPPTNVGSNTYGGSPAGSPTSTEEGTSESATPESGPGTSTEPSEGSAPGSPAGSPTSTEEGTSTEPSEGSAPGTSTEPSEGSAPGTSESATPESGPGSEPATSGSETPGSEPATSGSETPGSPAGSPTSTEEGTSESATPESGPGTSTEPSEGSAPGTSTEPSEGSAPGSPAGSPTSTEEGTSTEPSEGSAPGTSTEPSEGSAPGTSESATPESGPGTSTEPSEGSAPGTSESATPESGPGSEPATSGSETPGTSTEPSEGSAPGTSTEPSEGSAPGTSESATPESGPGTSESATPESGPGSPAGSPTSTEEGTSESATPESGPGSEPATSGSETPGTSESATPESGPGTSTEPSEGSAPGTSTEPSEGSAPGTSTEPSEGSAPGTSTEPSEGSAPGTSTEPSEGSAPGTSTEPSEGSAPGSPAGSPTSTEEGTSTEPSEGSAPGTSESATPESGPGSEPATSGSETPGTSESATPESGPGSEPATSGSETPGTSESATPESGPGTSTEPSEGSAPGTSESATPESGPGSPAGSPTSTEEGSPAGSPTSTEEGSPAGSPTSTEEGTSESATPESGPGTSTEPSEGSAPGFRVDEEFQSPFASQSRGYFLFRPRN

SEQ ID NO: 2165 - protein, 639 aa, Artificial Sequence
  Description of Artificial Sequence: Synthetic polypeptide
YPIKPEAPGEDASPEELNRYYASLRHYLNLVTRQRYGGSPAGSPTSTEEGTSESATPESGPGTSTEPSEGSAPGSPAGSPTSTEEGTSTEPSEGSAPGTSTEPSEGSAPGTSESATPESGPGSEPATSGSETPGSEPATSGSETPGSPAGSPTSTEEGTSESATPESGPGTSTEPSEGSAPGTSTEPSEGSAPGSPAGSPTSTEEGTSTEPSEGSAPGTSTEPSEGSAPGTSESATPESGPGTSTEPSEGSAPGTSESATPESGPGSEPATSGSETPGTSTEPSEGSAPGTSTEPSEGSAPGTSESATPESGPGTSESATPESGPGSPAGSPTSTEEGTSESATPESGPGSEPATSGSETPGTSESATPESGPGTSTEPSEGSAPGTSTEPSEGSAPGTSTEPSEGSAPGTSTEPSEGSAPGTSTEPSEGSAPGTSTEPSEGSAPGSPAGSPTSTEEGTSTEPSEGSAPGTSESATPESGPGSEPATSGSETPGTSESATPESGPGSEPATSGSETPGTSESATPESGPGTSTEPSEGSAPGTSESATPESGPGSPAGSPTSTEEGSPAGSPTSTEEGSPAGSPTSTEEGTSESATPESGPGTSTEPSEGSAPGFRVDEEFQSPFASQSRGYFLFRPRN

SEQ ID NO: 2166 - protein, 644 aa, Artificial Sequence
  Description of Artificial Sequence: Synthetic polypeptide
IVLSLDVPIGLLQILLEQARARAAREQATTNARILARVGHCGGSPAGSPTSTEEGTSESATPESGPGTSTEPSEGSAPGSPAGSPTSTEEGTSTEPSEGSAPGTSTEPSEGSAPGTSESATPESGPGSEPATSGSETPGSEPATSGSETPGSPAGSPTSTEEGTSESATPESGPGTSTEPSEGSAPGTSTEPSEGSAPGSPAGSPTSTEEGTSTEPSEGSAPGTSTEPSEGSAPGTSESATPESGPGTSTEPSEGSAPGTSESATPESGPGSEPATSGSETPGTSTEPSEGSAPGTSTEPSEGSAPGTSESATPESGPGTSESATPESGPGSPAGSPTSTEEGTSESATPESGPGSEPATSGSETPGTSESATPESGPGTSTEPSEGSAPGTSTEPSEGSAPGTSTEPSEGSAPGTSTEPSEGSAPGTSTEPSEGSAPGTSTEPSEGSAPGSPAGSPTSTEEGTSTEPSEGSAPGTSESATPESGPGSEPATSGSETPGTSESATPESGPGSEPATSGSETPGTSESATPESGPGTSTEPSEGSAPGTSESATPESGPGSPAGSPTSTEEGSPAGSPTSTEEGSPAGSPTSTEEGTSESATPESGPGTSTEPSEGSAPGFRVDEEFQSPFASQSRGYFLFRPRN

SEQ ID NO: 2167 - protein, 641 aa, Artificial Sequence
  Description of Artificial Sequence: Synthetic polypeptide
FTLSLDVPTNIMNLLFNIAKAKNLRAQAAANAHLMAQIGGSPAGSPTSTEEGTSESATPESGPGTSTEPSEGSAPGSPAGSPTSTEEGTSTEPSEGSAPGTSTEPSEGSAPGTSESATPESGPGSEPATSGSETPGSEPATSGSETPGSPAGSPTSTEEGTSESATPESGPGTSTEPSEGSAPGTSTEPSEGSAPGSPAGSPTSTEEGTSTEPSEGSAPGTSTEPSEGSAPGTSESATPESGPGTSTEPSEGSAPGTSESATPESGPGSEPATSGSETPGTSTEPSEGSAPGTSTEPSEGSAPGTSESATPESGPGTSESATPESGPGSPAGSPTSTEEGTSESATPESGPGSEPATSGSETPGTSESATPESGPGTSTEPSEGSAPGTSTEPSEGSAPGTSTEPSEGSAPGTSTEPSEGSAPGTSTEPSEGSAPGTSTEPSEGSAPGSPAGSPTSTEEGTSTEPSEGSAPGTSESATPESGPGSEPATSGSETPGTSESATPESGPGSEPATSGSETPGTSESATPESGPGTSTEPSEGSAPGTSESATPESGPGSPAGSPTSTEEGSPAGSPTSTEEGSPAGSPTSTEEGTSESATPESGPGTSTEPSEGSAPGFRVDEEFQSPFASQSRGYFLFRPRN

SEQ ID NO: 2168 - protein, 652 aa, Artificial Sequence
  Description of Artificial Sequence: Synthetic polypeptide
HSQGTFTSDYSKYLDSRRAQDFVQWLMNTKRNRNNIAGGSPAGSPTSTEEGTSESATPESGPGTSTEPSEGSAPGSPAGSPTSTEEGTSTEPSEGSAPGTSTEPSEGSAPGTSESATPESGPGSEPATSGSETPGSEPATSGSETPGSPAGSPTSTEEGTSESATPESGPGTSTEPSEGSAPGTSTEPSEGSAPGSPAGSPTSTEEGTSTEPSEGSAPGTSTEPSEGSAPGTSESATPESGPGTSTEPSEGSAPGTSESATPESGPGSEPATSGSETPGTSTEPSEGSAPGTSTEPSEGSAPGTSESATPESGPGTSESATPESGPGSPAGSPTSTEEGTSESATPESGPGSEPATSGSETPGTSESATPESGPGTSTEPSEGSAPGTSTEPSEGSAPGTSTEPSEGSAPGTSTEPSEGSAPGTSTEPSEGSAPGTSTEPSEGSAPGSPAGSPTSTEEGTSTEPSEGSAPGTSESATPESGPGSEPATSGSETPGTSESATPESGPGSEPATSGSETPGTSESATPESGPGTSTEPSEGSAPGTSESATPESGPGSPAGSPTSTEEGSPAGSPTSTEEGSPAGSPTSTEEGTSESATPESGPGTSTEPSEGSAPGKCNTATCATNRLANFLVHSSNNFGPILPPTNVGSNTY

SEQ ID NO: 2169 - protein, 651 aa, Artificial Sequence
  Description of Artificial Sequence: Synthetic polypeptide
HSQGTFTSDYSKYLDSRRAQDFVQWLMNTKRNRNNIAGGSPAGSPTSTEEGTSESATPESGPGTSTEPSEGSAPGSPAGSPTSTEEGTSTEPSEGSAPGTSTEPSEGSAPGTSESATPESGPGSEPATSGSETPGSEPATSGSETPGSPAGSPTSTEEGTSESATPESGPGTSTEPSEGSAPGTSTEPSEGSAPGSPAGSPTSTEEGTSTEPSEGSAPGTSTEPSEGSAPGTSESATPESGPGTSTEPSEGSAPGTSESATPESGPGSEPATSGSETPGTSTEPSEGSAPGTSTEPSEGSAPGTSESATPESGPGTSESATPESGPGSPAGSPTSTEEGTSESATPESGPGSEPATSGSETPGTSESATPESGPGTSTEPSEGSAPGTSTEPSEGSAPGTSTEPSEGSAPGTSTEPSEGSAPGTSTEPSEGSAPGTSTEPSEGSAPGSPAGSPTSTEEGTSTEPSEGSAPGTSESATPESGPGSEPATSGSETPGTSESATPESGPGSEPATSGSETPGTSESATPESGPGTSTEPSEGSAPGTSESATPESGPGSPAGSPTSTEEGSPAGSPTSTEEGSPAGSPTSTEEGTSESATPESGPGTSTEPSEGSAPGYPIKPEAPGEDASPEELNRYYASLRHYLNLVTRQRY

SEQ ID NO: 2170 - protein, 656 aa, Artificial Sequence
  Description of Artificial Sequence: Synthetic polypeptide
HSQGTFTSDYSKYLDSRRAQDFVQWLMNTKRNRNNIAGGSPAGSPTSTEEGTSESATPESGPGTSTEPSEGSAPGSPAGSPTSTEEGTSTEPSEGSAPGTSTEPSEGSAPGTSESATPESGPGSEPATSGSETPGSEPATSGSETPGSPAGSPTSTEEGTSESATPESGPGTSTEPSEGSAPGTSTEPSEGSAPGSPAGSPTSTEEGTSTEPSEGSAPGTSTEPSEGSAPGTSESATPESGPGTSTEPSEGSAPGTSESATPESGPGSEPATSGSETPGTSTEPSEGSAPGTSTEPSEGSAPGTSESATPESGPGTSESATPESGPGSPAGSPTSTEEGTSESATPESGPGSEPATSGSETPGTSESATPESGPGTSTEPSEGSAPGTSTEPSEGSAPGTSTEPSEGSAPGTSTEPSEGSAPGTSTEPSEGSAPGTSTEPSEGSAPGSPAGSPTSTEEGTSTEPSEGSAPGTSESATPESGPGSEPATSGSETPGTSESATPESGPGSEPATSGSETPGTSESATPESGPGTSTEPSEGSAPGTSESATPESGPGSPAGSPTSTEEGSPAGSPTSTEEGSPAGSPTSTEEGTSESATPESGPGTSTEPSEGSAPGIVLSLDVPIGLLQILLEQARARAAREQATTNARILARVGHC

SEQ ID NO: 2171 - protein, 653 aa, Artificial Sequence
  Description of Artificial Sequence: Synthetic polypeptide
HSQGTFTSDYSKYLDSRRAQDFVQWLMNTKRNRNNIAGGSPAGSPTSTEEGTSESATPESGPGTSTEPSEGSAPGSPAGSPTSTEEGTSTEPSEGSAPGTSTEPSEGSAPGTSESATPESGPGSEPATSGSETPGSEPATSGSETPGSPAGSPTSTEEGTSESATPESGPGTSTEPSEGSAPGTSTEPSEGSAPGSPAGSPTSTEEGTSTEPSEGSAPGTSTEPSEGSAPGTSESATPESGPGTSTEPSEGSAPGTSESATPESGPGSEPATSGSETPGTSTEPSEGSAPGTSTEPSEGSAPGTSESATPESGPGTSESATPESGPGSPAGSPTSTEEGTSESATPESGPGSEPATSGSETPGTSESATPESGPGTSTEPSEGSAPGTSTEPSEGSAPGTSTEPSEGSAPGTSTEPSEGSAPGTSTEPSEGSAPGTSTEPSEGSAPGSPAGSPTSTEEGTSTEPSEGSAPGTSESATPESGPGSEPATSGSETPGTSESATPESGPGSEPATSGSETPGTSESATPESGPGTSTEPSEGSAPGTSESATPESGPGSPAGSPTSTEEGSPAGSPTSTEEGSPAGSPTSTEEGTSESATPESGPGTSTEPSEGSAPGFTLSLDVPTNIMNLLFNIAKAKNLRAQAAANAHLMAQI

SEQ ID NO: 2172 - protein, 652 aa, Artificial Sequence
  Description of Artificial Sequence: Synthetic polypeptide
KCNTATCATNRLANFLVHSSNNFGPILPPTNVGSNTYGGSPAGSPTSTEEGTSESATPESGPGTSTEPSEGSAPGSPAGSPTSTEEGTSTEPSEGSAPGTSTEPSEGSAPGTSESATPESGPGSEPATSGSETPGSEPATSGSETPGSPAGSPTSTEEGTSESATPESGPGTSTEPSEGSAPGTSTEPSEGSAPGSPAGSPTSTEEGTSTEPSEGSAPGTSTEPSEGSAPGTSESATPESGPGTSTEPSEGSAPGTSESATPESGPGSEPATSGSETPGTSTEPSEGSAPGTSTEPSEGSAPGTSESATPESGPGTSESATPESGPGSPAGSPTSTEEGTSESATPESGPGSEPATSGSETPGTSESATPESGPGTSTEPSEGSAPGTSTEPSEGSAPGTSTEPSEGSAPGTSTEPSEGSAPGTSTEPSEGSAPGTSTEPSEGSAPGSPAGSPTSTEEGTSTEPSEGSAPGTSESATPESGPGSEPATSGSETPGTSESATPESGPGSEPATSGSETPGTSESATPESGPGTSTEPSEGSAPGTSESATPESGPGSPAGSPTSTEEGSPAGSPTSTEEGSPAGSPTSTEEGTSESATPESGPGTSTEPSEGSAPGHSQGTFTSDYSKYLDSRRAQDFVQWLMNTKRNRNNIA

SEQ ID NO: 2173 - protein, 651 aa, Artificial Sequence
  Description of Artificial Sequence: Synthetic polypeptide
YPIKPEAPGEDASPEELNRYYASLRHYLNLVTRQRYGGSPAGSPTSTEEGTSESATPESGPGTSTEPSEGSAPGSPAGSPTSTEEGTSTEPSEGSAPGTSTEPSEGSAPGTSESATPESGPGSEPATSGSETPGSEPATSGSETPGSPAGSPTSTEEGTSESATPESGPGTSTEPSEGSAPGTSTEPSEGSAPGSPAGSPTSTEEGTSTEPSEGSAPGTSTEPSEGSAPGTSESATPESGPGTSTEPSEGSAPGTSESATPESGPGSEPATSGSETPGTSTEPSEGSAPGTSTEPSEGSAPGTSESATPESGPGTSESATPESGPGSPAGSPTSTEEGTSESATPESGPGSEPATSGSETPGTSESATPESGPGTSTEPSEGSAPGTSTEPSEGSAPGTSTEPSEGSAPGTSTEPSEGSAPGTSTEPSEGSAPGTSTEPSEGSAPGSPAGSPTSTEEGTSTEPSEGSAPGTSESATPESGPGSEPATSGSETPGTSESATPESGPGSEPATSGSETPGTSESATPESGPGTSTEPSEGSAPGTSESATPESGPGSPAGSPTSTEEGSPAGSPTSTEEGSPAGSPTSTEEGTSESATPESGPGTSTEPSEGSAPGHSQGTFTSDYSKYLDSRRAQDFVQWLMNTKRNRNNIA

SEQ ID NO: 2174 - protein, 656 aa, Artificial Sequence
  Description of Artificial Sequence: Synthetic polypeptide
IVLSLDVPIGLLQILLEQARARAAREQATTNARILARVGHCGGSPAGSPTSTEEGTSESATPESGPGTSTEPSEGSAPGSPAGSPTSTEEGTSTEPSEGSAPGTSTEPSEGSAPGTSESATPESGPGSEPATSGSETPGSEPATSGSETPGSPAGSPTSTEEGTSESATPESGPGTSTEPSEGSAPGTSTEPSEGSAPGSPAGSPTSTEEGTSTEPSEGSAPGTSTEPSEGSAPGTSESATPESGPGTSTEPSEGSAPGTSESATPESGPGSEPATSGSETPGTSTEPSEGSAPGTSTEPSEGSAPGTSESATPESGPGTSESATPESGPGSPAGSPTSTEEGTSESATPESGPGSEPATSGSETPGTSESATPESGPGTSTEPSEGSAPGTSTEPSEGSAPGTSTEPSEGSAPGTSTEPSEGSAPGTSTEPSEGSAPGTSTEPSEGSAPGSPAGSPTSTEEGTSTEPSEGSAPGTSESATPESGPGSEPATSGSETPGTSESATPESGPGSEPATSGSETPGTSESATPESGPGTSTEPSEGSAPGTSESATPESGPGSPAGSPTSTEEGSPAGSPTSTEEGSPAGSPTSTEEGTSESATPESGPGTSTEPSEGSAPGHSQGTFTSDYSKYLDSRRAQDFVQWLMNTKRNRNNIA

SEQ ID NO: 2175 - protein, 653 aa, Artificial Sequence
  Description of Artificial Sequence: Synthetic polypeptide
FTLSLDVPTNIMNLLFNIAKAKNLRAQAAANAHLMAQIGGSPAGSPTSTEEGTSESATPESGPGTSTEPSEGSAPGSPAGSPTSTEEGTSTEPSEGSAPGTSTEPSEGSAPGTSESATPESGPGSEPATSGSETPGSEPATSGSETPGSPAGSPTSTEEGTSESATPESGPGTSTEPSEGSAPGTSTEPSEGSAPGSPAGSPTSTEEGTSTEPSEGSAPGTSTEPSEGSAPGTSESATPESGPGTSTEPSEGSAPGTSESATPESGPGSEPATSGSETPGTSTEPSEGSAPGTSTEPSEGSAPGTSESATPESGPGTSESATPESGPGSPAGSPTSTEEGTSESATPESGPGSEPATSGSETPGTSESATPESGPGTSTEPSEGSAPGTSTEPSEGSAPGTSTEPSEGSAPGTSTEPSEGSAPGTSTEPSEGSAPGTSTEPSEGSAPGSPAGSPTSTEEGTSTEPSEGSAPGTSESATPESGPGSEPATSGSETPGTSESATPESGPGSEPATSGSETPGTSESATPESGPGTSTEPSEGSAPGTSESATPESGPGSPAGSPTSTEEGSPAGSPTSTEEGSPAGSPTSTEEGTSESATPESGPGTSTEPSEGSAPGHSQGTFTSDYSKYLDSRRAQDFVQWLMNTKRNRNNIA

SEQ ID NO: 2176 - protein, 651 aa, Artificial Sequence
  Description of Artificial Sequence: Synthetic polypeptide
KCNTATCATNRLANFLVHSSNNFGPILPPTNVGSNTYGGSPAGSPTSTEEGTSESATPESGPGTSTEPSEGSAPGSPAGSPTSTEEGTSTEPSEGSAPGTSTEPSEGSAPGTSESATPESGPGSEPATSGSETPGSEPATSGSETPGSPAGSPTSTEEGTSESATPESGPGTSTEPSEGSAPGTSTEPSEGSAPGSPAGSPTSTEEGTSTEPSEGSAPGTSTEPSEGSAPGTSESATPESGPGTSTEPSEGSAPGTSESATPESGPGSEPATSGSETPGTSTEPSEGSAPGTSTEPSEGSAPGTSESATPESGPGTSESATPESGPGSPAGSPTSTEEGTSESATPESGPGSEPATSGSETPGTSESATPESGPGTSTEPSEGSAPGTSTEPSEGSAPGTSTEPSEGSAPGTSTEPSEGSAPGTSTEPSEGSAPGTSTEPSEGSAPGSPAGSPTSTEEGTSTEPSEGSAPGTSESATPESGPGSEPATSGSETPGTSESATPESGPGSEPATSGSETPGTSESATPESGPGTSTEPSEGSAPGTSESATPESGPGSPAGSPTSTEEGSPAGSPTSTEEGSPAGSPTSTEEGTSESATPESGPGTSTEPSEGSAPGYPIKPEAPGEDASPEELNRYYASLRHYLNLVTRQRY

SEQ ID NO: 2177 - protein, 656 aa, Artificial Sequence
  Description of Artificial Sequence: Synthetic polypeptide
KCNTATCATNRLANFLVHSSNNFGPILPPTNVGSNTYGGSPAGSPTSTEEGTSESATPESGPGTSTEPSEGSAPGSPAGSPTSTEEGTSTEPSEGSAPGTSTEPSEGSAPGTSESATPESGPGSEPATSGSETPGSEPATSGSETPGSPAGSPTSTEEGTSESATPESGPGTSTEPSEGSAPGTSTEPSEGSAPGSPAGSPTSTEEGTSTEPSEGSAPGTSTEPSEGSAPGTSESATPESGPGTSTEPSEGSAPGTSESATPESGPGSEPATSGSETPGTSTEPSEGSAPGTSTEPSEGSAPGTSESATPESGPGTSESATPESGPGSPAGSPTSTEEGTSESATPESGPGSEPATSGSETPGTSESATPESGPGTSTEPSEGSAPGTSTEPSEGSAPGTSTEPSEGSAPGTSTEPSEGSAPGTSTEPSEGSAPGTSTEPSEGSAPGSPAGSPTSTEEGTSTEPSEGSAPGTSESATPESGPGSEPATSGSETPGTSESATPESGPGSEPATSGSETPGTSESATPESGPGTSTEPSEGSAPGTSESATPESGPGSPAGSPTSTEEGSPAGSPTSTEEGSPAGSPTSTEEGTSESATPESGPGTSTEPSEGSAPGIVLSLDVPIGLLQILLEQARARAAREQATTNARILARVGHC

SEQ ID NO: 2178 - protein, 653 aa, Artificial Sequence
  Description of Artificial Sequence: Synthetic polypeptide
KCNTATCATNRLANFLVHSSNNFGPILPPTNVGSNTYGGSPAGSPTSTEEGTSESATPESGPGTSTEPSEGSAPGSPAGSPTSTEEGTSTEPSEGSAPGTSTEPSEGSAPGTSESATPESGPGSEPATSGSETPGSEPATSGSETPGSPAGSPTSTEEGTSESATPESGPGTSTEPSEGSAPGTSTEPSEGSAPGSPAGSPTSTEEGTSTEPSEGSAPGTSTEPSEGSAPGTSESATPESGPGTSTEPSEGSAPGTSESATPESGPGSEPATSGSETPGTSTEPSEGSAPGTSTEPSEGSAPGTSESATPESGPGTSESATPESGPGSPAGSPTSTEEGTSESATPESGPGSEPATSGSETPGTSESATPESGPGTSTEPSEGSAPGTSTEPSEGSAPGTSTEPSEGSAPGTSTEPSEGSAPGTSTEPSEGSAPGTSTEPSEGSAPGSPAGSPTSTEEGTSTEPSEGSAPGTSESATPESGPGSEPATSGSETPGTSESATPESGPGSEPATSGSETPGTSESATPESGPGTSTEPSEGSAPGTSESATPESGPGSPAGSPTSTEEGSPAGSPTSTEEGSPAGSPTSTEEGTSESATPESGPGTSTEPSEGSAPGFTLSLDVPTNIMNLLFNIAKAKNLRAQAAANAHLMAQI

SEQ ID NO: 2179 - protein, 651 aa, Artificial Sequence
  Description of Artificial Sequence: Synthetic polypeptide
YPIKPEAPGEDASPEELNRYYASLRHYLNLVTRQRYGGSPAGSPTSTEEGTSESATPESGPGTSTEPSEGSAPGSPAGSPTSTEEGTSTEPSEGSAPGTSTEPSEGSAPGTSESATPESGPGSEPATSGSETPGSEPATSGSETPGSPAGSPTSTEEGTSESATPESGPGTSTEPSEGSAPGTSTEPSEGSAPGSPAGSPTSTEEGTSTEPSEGSAPGTSTEPSEGSAPGTSESATPESGPGTSTEPSEGSAPGTSESATPESGPGSEPATSGSETPGTSTEPSEGSAPGTSTEPSEGSAPGTSESATPESGPGTSESATPESGPGSPAGSPTSTEEGTSESATPESGPGSEPATSGSETPGTSESATPESGPGTSTEPSEGSAPGTSTEPSEGSAPGTSTEPSEGSAPGTSTEPSEGSAPGTSTEPSEGSAPGTSTEPSEGSAPGSPAGSPTSTEEGTSTEPSEGSAPGTSESATPESGPGSEPATSGSETPGTSESATPESGPGSEPATSGSETPGTSESATPESGPGTSTEPSEGSAPGTSESATPESGPGSPAGSPTSTEEGSPAGSPTSTEEGSPAGSPTSTEEGTSESATPESGPGTSTEPSEGSAPGKCNTATCATNRLANFLVHSSNNFGPILPPTNVGSNTY

SEQ ID NO: 2180 - protein, 656 aa, Artificial Sequence
  Description of Artificial Sequence: Synthetic polypeptide
IVLSLDVPIGLLQILLEQARARAAREQATTNARILARVGHCGGSPAGSPTSTEEGTSESATPESGPGTSTEPSEGSAPGSPAGSPTSTEEGTSTEPSEGSAPGTSTEPSEGSAPGTSESATPESGPGSEPATSGSETPGSEPATSGSETPGSPAGSPTSTEEGTSESATPESGPGTSTEPSEGSAPGTSTEPSEGSAPGSPAGSPTSTEEGTSTEPSEGSAPGTSTEPSEGSAPGTSESATPESGPGTSTEPSEGSAPGTSESATPESGPGSEPATSGSETPGTSTEPSEGSAPGTSTEPSEGSAPGTSESATPESGPGTSESATPESGPGSPAGSPTSTEEGTSESATPESGPGSEPATSGSETPGTSESATPESGPGTSTEPSEGSAPGTSTEPSEGSAPGTSTEPSEGSAPGTSTEPSEGSAPGTSTEPSEGSAPGTSTEPSEGSAPGSPAGSPTSTEEGTSTEPSEGSAPGTSESATPESGPGSEPATSGSETPGTSESATPESGPGSEPATSGSETPGTSESATPESGPGTSTEPSEGSAPGTSESATPESGPGSPAGSPTSTEEGSPAGSPTSTEEGSPAGSPTSTEEGTSESATPESGPGTSTEPSEGSAPGKCNTATCATNRLANFLVHSSNNFGPILPPTNVGSNTY

SEQ ID NO: 2181 - protein, 653 aa, Artificial Sequence
  Description of Artificial Sequence: Synthetic polypeptide
FTLSLDVPTNIMNLLFNIAKAKNLRAQAAANAHLMAQIGGSPAGSPTSTEEGTSESATPESGPGTSTEPSEGSAPGSPAGSPTSTEEGTSTEPSEGSAPGTSTEPSEGSAPGTSESATPESGPGSEPATSGSETPGSEPATSGSETPGSPAGSPTSTEEGTSESATPESGPGTSTEPSEGSAPGTSTEPSEGSAPGSPAGSPTSTEEGTSTEPSEGSAPGTSTEPSEGSAPGTSESATPESGPGTSTEPSEGSAPGTSESATPESGPGSEPATSGSETPGTSTEPSEGSAPGTSTEPSEGSAPGTSESATPESGPGTSESATPESGPGSPAGSPTSTEEGTSESATPESGPGSEPATSGSETPGTSESATPESGPGTSTEPSEGSAPGTSTEPSEGSAPGTSTEPSEGSAPGTSTEPSEGSAPGTSTEPSEGSAPGTSTEPSEGSAPGSPAGSPTSTEEGTSTEPSEGSAPGTSESATPESGPGSEPATSGSETPGTSESATPESGPGSEPATSGSETPGTSESATPESGPGTSTEPSEGSAPGTSESATPESGPGSPAGSPTSTEEGSPAGSPTSTEEGSPAGSPTSTEEGTSESATPESGPGTSTEPSEGSAPGKCNTATCATNRLANFLVHSSNNFGPILPPTNVGSNTY

SEQ ID NO: 2182 - protein, 655 aa, Artificial Sequence
  Description of Artificial Sequence: Synthetic polypeptide
YPIKPEAPGEDASPEELNRYYASLRHYLNLVTRQRYGGSPAGSPTSTEEGTSESATPESGPGTSTEPSEGSAPGSPAGSPTSTEEGTSTEPSEGSAPGTSTEPSEGSAPGTSESATPESGPGSEPATSGSETPGSEPATSGSETPGSPAGSPTSTEEGTSESATPESGPGTSTEPSEGSAPGTSTEPSEGSAPGSPAGSPTSTEEGTSTEPSEGSAPGTSTEPSEGSAPGTSESATPESGPGTSTEPSEGSAPGTSESATPESGPGSEPATSGSETPGTSTEPSEGSAPGTSTEPSEGSAPGTSESATPESGPGTSESATPESGPGSPAGSPTSTEEGTSESATPESGPGSEPATSGSETPGTSESATPESGPGTSTEPSEGSAPGTSTEPSEGSAPGTSTEPSEGSAPGTSTEPSEGSAPGTSTEPSEGSAPGTSTEPSEGSAPGSPAGSPTSTEEGTSTEPSEGSAPGTSESATPESGPGSEPATSGSETPGTSESATPESGPGSEPATSGSETPGTSESATPESGPGTSTEPSEGSAPGTSESATPESGPGSPAGSPTSTEEGSPAGSPTSTEEGSPAGSPTSTEEGTSESATPESGPGTSTEPSEGSAPGIVLSLDVPIGLLQILLEQARARAAREQATTNARILARVGHC

SEQ ID NO: 2183 - protein, 652 aa, Artificial Sequence
  Description of Artificial Sequence: Synthetic polypeptide
YPIKPEAPGEDASPEELNRYYASLRHYLNLVTRQRYGGSPAGSPTSTEEGTSESATPESGPGTSTEPSEGSAPGSPAGSPTSTEEGTSTEPSEGSAPGTSTEPSEGSAPGTSESATPESGPGSEPATSGSETPGSEPATSGSETPGSPAGSPTSTEEGTSESATPESGPGTSTEPSEGSAPGTSTEPSEGSAPGSPAGSPTSTEEGTSTEPSEGSAPGTSTEPSEGSAPGTSESATPESGPGTSTEPSEGSAPGTSESATPESGPGSEPATSGSETPGTSTEPSEGSAPGTSTEPSEGSAPGTSESATPESGPGTSESATPESGPGSPAGSPTSTEEGTSESATPESGPGSEPATSGSETPGTSESATPESGPGTSTEPSEGSAPGTSTEPSEGSAPGTSTEPSEGSAPGTSTEPSEGSAPGTSTEPSEGSAPGTSTEPSEGSAPGSPAGSPTSTEEGTSTEPSEGSAPGTSESATPESGPGSEPATSGSETPGTSESATPESGPGSEPATSGSETPGTSESATPESGPGTSTEPSEGSAPGTSESATPESGPGSPAGSPTSTEEGSPAGSPTSTEEGSPAGSPTSTEEGTSESATPESGPGTSTEPSEGSAPGFTLSLDVPTNIMNLLFNIAKAKNLRAQAAANAHLMAQI

SEQ ID NO: 2184 - protein, 655 aa, Artificial Sequence
  Description of Artificial Sequence: Synthetic polypeptide
IVLSLDVPIGLLQILLEQARARAAREQATTNARILARVGHCGGSPAGSPTSTEEGTSESATPESGPGTSTEPSEGSAPGSPAGSPTSTEEGTSTEPSEGSAPGTSTEPSEGSAPGTSESATPESGPGSEPATSGSETPGSEPATSGSETPGSPAGSPTSTEEGTSESATPESGPGTSTEPSEGSAPGTSTEPSEGSAPGSPAGSPTSTEEGTSTEPSEGSAPGTSTEPSEGSAPGTSESATPESGPGTSTEPSEGSAPGTSESATPESGPGSEPATSGSETPGTSTEPSEGSAPGTSTEPSEGSAPGTSESATPESGPGTSESATPESGPGSPAGSPTSTEEGTSESATPESGPGSEPATSGSETPGTSESATPESGPGTSTEPSEGSAPGTSTEPSEGSAPGTSTEPSEGSAPGTSTEPSEGSAPGTSTEPSEGSAPGTSTEPSEGSAPGSPAGSPTSTEEGTSTEPSEGSAPGTSESATPESGPGSEPATSGSETPGTSESATPESGPGSEPATSGSETPGTSESATPESGPGTSTEPSEGSAPGTSESATPESGPGSPAGSPTSTEEGSPAGSPTSTEEGSPAGSPTSTEEGTSESATPESGPGTSTEPSEGSAPGYPIKPEAPGEDASPEELNRYYASLRHYLNLVTRQRY

SEQ ID NO: 2185 - protein, 652 aa, Artificial Sequence
  Description of Artificial Sequence: Synthetic polypeptide
FTLSLDVPTNIMNLLFNIAKAKNLRAQAAANAHLMAQIGGSPAGSPTSTEEGTSESATPESGPGTSTEPSEGSAPGSPAGSPTSTEEGTSTEPSEGSAPGTSTEPSEGSAPGTSESATPESGPGSEPATSGSETPGSEPATSGSETPGSPAGSPTSTEEGTSESATPESGPGTSTEPSEGSAPGTSTEPSEGSAPGSPAGSPTSTEEGTSTEPSEGSAPGTSTEPSEGSAPGTSESATPESGPGTSTEPSEGSAPGTSESATPESGPGSEPATSGSETPGTSTEPSEGSAPGTSTEPSEGSAPGTSESATPESGPGTSESATPESGPGSPAGSPTSTEEGTSESATPESGPGSEPATSGSETPGTSESATPESGPGTSTEPSEGSAPGTSTEPSEGSAPGTSTEPSEGSAPGTSTEPSEGSAPGTSTEPSEGSAPGTSTEPSEGSAPGSPAGSPTSTEEGTSTEPSEGSAPGTSESATPESGPGSEPATSGSETPGTSESATPESGPGSEPATSGSETPGTSESATPESGPGTSTEPSEGSAPGTSESATPESGPGSPAGSPTSTEEGSPAGSPTSTEEGSPAGSPTSTEEGTSESATPESGPGTSTEPSEGSAPGYPIKPEAPGEDASPEELNRYYASLRHYLNLVTRQRY

SEQ ID NO: 2186 - protein, 657 aa, Artificial Sequence
  Description of Artificial Sequence: Synthetic polypeptide
IVLSLDVPIGLLQILLEQARARAAREQATTNARILARVGHCGGSPAGSPTSTEEGTSESATPESGPGTSTEPSEGSAPGSPAGSPTSTEEGTSTEPSEGSAPGTSTEPSEGSAPGTSESATPESGPGSEPATSGSETPGSEPATSGSETPGSPAGSPTSTEEGTSESATPESGPGTSTEPSEGSAPGTSTEPSEGSAPGSPAGSPTSTEEGTSTEPSEGSAPGTSTEPSEGSAPGTSESATPESGPGTSTEPSEGSAPGTSESATPESGPGSEPATSGSETPGTSTEPSEGSAPGTSTEPSEGSAPGTSESATPESGPGTSESATPESGPGSPAGSPTSTEEGTSESATPESGPGSEPATSGSETPGTSESATPESGPGTSTEPSEGSAPGTSTEPSEGSAPGTSTEPSEGSAPGTSTEPSEGSAPGTSTEPSEGSAPGTSTEPSEGSAPGSPAGSPTSTEEGTSTEPSEGSAPGTSESATPESGPGSEPATSGSETPGTSESATPESGPGSEPATSGSETPGTSESATPESGPGTSTEPSEGSAPGTSESATPESGPGSPAGSPTSTEEGSPAGSPTSTEEGSPAGSPTSTEEGTSESATPESGPGTSTEPSEGSAPGFTLSLDVPTNIMNLLFNIAKAKNLRAQAAANAHLMAQI

SEQ ID NO: 2187 - protein, 657 aa, Artificial Sequence
  Description of Artificial Sequence: Synthetic polypeptide
FTLSLDVPTNIMNLLFNIAKAKNLRAQAAANAHLMAQIGGSPAGSPTSTEEGTSESATPESGPGTSTEPSEGSAPGSPAGSPTSTEEGTSTEPSEGSAPGTSTEPSEGSAPGTSESATPESGPGSEPATSGSETPGSEPATSGSETPGSPAGSPTSTEEGTSESATPESGPGTSTEPSEGSAPGTSTEPSEGSAPGSPAGSPTSTEEGTSTEPSEGSAPGTSTEPSEGSAPGTSESATPESGPGTSTEPSEGSAPGTSESATPESGPGSEPATSGSETPGTSTEPSEGSAPGTSTEPSEGSAPGTSESATPESGPGTSESATPESGPGSPAGSPTSTEEGTSESATPESGPGSEPATSGSETPGTSESATPESGPGTSTEPSEGSAPGTSTEPSEGSAPGTSTEPSEGSAPGTSTEPSEGSAPGTSTEPSEGSAPGTSTEPSEGSAPGSPAGSPTSTEEGTSTEPSEGSAPGTSESATPESGPGSEPATSGSETPGTSESATPESGPGSEPATSGSETPGTSESATPESGPGTSTEPSEGSAPGTSESATPESGPGSPAGSPTSTEEGSPAGSPTSTEEGSPAGSPTSTEEGTSESATPESGPGTSTEPSEGSAPGIVLSLDVPIGLLQILLEQARARAAREQATTNARILARVGHC

SEQ ID NO: 2188 - protein, 658 aa, Artificial Sequence
  Description of Artificial Sequence: Synthetic polypeptide
YRQSMNNFQGLRSFGCRFGTCTVQKLAHQIYQFTDKDKDNVAPRSKISPQGYGGSPAGSPTSTEEGTSESATPESGPGTSTEPSEGSAPGSPAGSPTSTEEGTSTEPSEGSAPGTSTEPSEGSAPGTSESATPESGPGSEPATSGSETPGSEPATSGSETPGSPAGSPTSTEEGTSESATPESGPGTSTEPSEGSAPGTSTEPSEGSAPGSPAGSPTSTEEGTSTEPSEGSAPGTSTEPSEGSAPGTSESATPESGPGTSTEPSEGSAPGTSESATPESGPGSEPATSGSETPGTSTEPSEGSAPGTSTEPSEGSAPGTSESATPESGPGTSESATPESGPGSPAGSPTSTEEGTSESATPESGPGSEPATSGSETPGTSESATPESGPGTSTEPSEGSAPGTSTEPSEGSAPGTSTEPSEGSAPGTSTEPSEGSAPGTSTEPSEGSAPGTSTEPSEGSAPGSPAGSPTSTEEGTSTEPSEGSAPGTSESATPESGPGSEPATSGSETPGTSESATPESGPGSEPATSGSETPGTSESATPESGPGTSTEPSEGSAPGTSESATPESGPGSPAGSPTSTEEGSPAGSPTSTEEGSPAGSPTSTEEGTSESATPESGPGTSTEPSEGSAPGSLRRSSCFGGRMDRIGAQSGLGCNSFRY

SEQ ID NO: 2189 - protein, 662 aa, Artificial Sequence
  Description of Artificial Sequence: Synthetic polypeptide
YRQSMNNFQGLRSFGCRFGTCTVQKLAHQIYQFTDKDKDNVAPRSKISPQGYGGSPAGSPTSTEEGTSESATPESGPGTSTEPSEGSAPGSPAGSPTSTEEGTSTEPSEGSAPGTSTEPSEGSAPGTSESATPESGPGSEPATSGSETPGSEPATSGSETPGSPAGSPTSTEEGTSESATPESGPGTSTEPSEGSAPGTSTEPSEGSAPGSPAGSPTSTEEGTSTEPSEGSAPGTSTEPSEGSAPGTSESATPESGPGTSTEPSEGSAPGTSESATPESGPGSEPATSGSETPGTSTEPSEGSAPGTSTEPSEGSAPGTSESATPESGPGTSESATPESGPGSPAGSPTSTEEGTSESATPESGPGSEPATSGSETPGTSESATPESGPGTSTEPSEGSAPGTSTEPSEGSAPGTSTEPSEGSAPGTSTEPSEGSAPGTSTEPSEGSAPGTSTEPSEGSAPGSPAGSPTSTEEGTSTEPSEGSAPGTSESATPESGPGSEPATSGSETPGTSESATPESGPGSEPATSGSETPGTSESATPESGPGTSTEPSEGSAPGTSESATPESGPGSPAGSPTSTEEGSPAGSPTSTEEGSPAGSPTSTEEGTSESATPESGPGTSTEPSEGSAPGSPKMVQGSGGFGRKMDRISSSSGLGCKVLRRH

SEQ ID NO: 2190 - protein, 652 aa, Artificial Sequence
  Description of Artificial Sequence: Synthetic polypeptide
YRQSMNNFQGLRSFGCRFGTCTVQKLAHQIYQFTDKDKDNVAPRSKISPQGYGGSPAGSPTSTEEGTSESATPESGPGTSTEPSEGSAPGSPAGSPTSTEEGTSTEPSEGSAPGTSTEPSEGSAPGTSESATPESGPGSEPATSGSETPGSEPATSGSETPGSPAGSPTSTEEGTSESATPESGPGTSTEPSEGSAPGTSTEPSEGSAPGSPAGSPTSTEEGTSTEPSEGSAPGTSTEPSEGSAPGTSESATPESGPGTSTEPSEGSAPGTSESATPESGPGSEPATSGSETPGTSTEPSEGSAPGTSTEPSEGSAPGTSESATPESGPGTSESATPESGPGSPAGSPTSTEEGTSESATPESGPGSEPATSGSETPGTSESATPESGPGTSTEPSEGSAPGTSTEPSEGSAPGTSTEPSEGSAPGTSTEPSEGSAPGTSTEPSEGSAPGTSTEPSEGSAPGSPAGSPTSTEEGTSTEPSEGSAPGTSESATPESGPGSEPATSGSETPGTSESATPESGPGSEPATSGSETPGTSESATPESGPGTSTEPSEGSAPGTSESATPESGPGSPAGSPTSTEEGSPAGSPTSTEEGSPAGSPTSTEEGTSESATPESGPGTSTEPSEGSAPGGLSKGCFGLKLDRIGSMSGLGC

SEQ ID NO: 2191 - protein, 662 aa, Artificial Sequence
  Description of Artificial Sequence: Synthetic polypeptide
YRQSMNNFQGLRSFGCRFGTCTVQKLAHQIYQFTDKDKDNVAPRSKISPQGYGGSPAGSPTSTEEGTSESATPESGPGTSTEPSEGSAPGSPAGSPTSTEEGTSTEPSEGSAPGTSTEPSEGSAPGTSESATPESGPGSEPATSGSETPGSEPATSGSETPGSPAGSPTSTEEGTSESATPESGPGTSTEPSEGSAPGTSTEPSEGSAPGSPAGSPTSTEEGTSTEPSEGSAPGTSTEPSEGSAPGTSESATPESGPGTSTEPSEGSAPGTSESATPESGPGSEPATSGSETPGTSTEPSEGSAPGTSTEPSEGSAPGTSESATPESGPGTSESATPESGPGSPAGSPTSTEEGTSESATPESGPGSEPATSGSETPGTSESATPESGPGTSTEPSEGSAPGTSTEPSEGSAPGTSTEPSEGSAPGTSTEPSEGSAPGTSTEPSEGSAPGTSTEPSEGSAPGSPAGSPTSTEEGTSTEPSEGSAPGTSESATPESGPGSEPATSGSETPGTSESATPESGPGSEPATSGSETPGTSESATPESGPGTSTEPSEGSAPGTSESATPESGPGSPAGSPTSTEEGSPAGSPTSTEEGSPAGSPTSTEEGTSESATPESGPGTSTEPSEGSAPGTAPRSLRRSSCFGGRMDRIGAQSGLGCNSFRY

SEQ ID NO: 2192 - protein, 671 aa, Artificial Sequence
  Description of Artificial Sequence: Synthetic polypeptide
YRQSMNNFQGLRSFGCRFGTCTVQKLAHQIYQFTDKDKDNVAPRSKISPQGYGGSPAGSPTSTEEGTSESATPESGPGTSTEPSEGSAPGSPAGSPTSTEEGTSTEPSEGSAPGTSTEPSEGSAPGTSESATPESGPGSEPATSGSETPGSEPATSGSETPGSPAGSPTSTEEGTSESATPESGPGTSTEPSEGSAPGTSTEPSEGSAPGSPAGSPTSTEEGTSTEPSEGSAPGTSTEPSEGSAPGTSESATPESGPGTSTEPSEGSAPGTSESATPESGPGSEPATSGSETPGTSTEPSEGSAPGTSTEPSEGSAPGTSESATPESGPGTSESATPESGPGSPAGSPTSTEEGTSESATPESGPGSEPATSGSETPGTSESATPESGPGTSTEPSEGSAPGTSTEPSEGSAPGTSTEPSEGSAPGTSTEPSEGSAPGTSTEPSEGSAPGTSTEPSEGSAPGSPAGSPTSTEEGTSTEPSEGSAPGTSESATPESGPGSEPATSGSETPGTSESATPESGPGSEPATSGSETPGTSESATPESGPGTSTEPSEGSAPGTSESATPESGPGSPAGSPTSTEEGSPAGSPTSTEEGSPAGSPTSTEEGTSESATPESGPGTSTEPSEGSAPGIVLSLDVPIGLLQILLEQARARAAREQATTNARILARVGHC

SEQ ID NO: 2193 - protein, 668 aa, Artificial Sequence
  Description of Artificial Sequence: Synthetic polypeptide
YRQSMNNFQGLRSFGCRFGTCTVQKLAHQIYQFTDKDKDNVAPRSKISPQGYGGSPAGSPTSTEEGTSESATPESGPGTSTEPSEGSAPGSPAGSPTSTEEGTSTEPSEGSAPGTSTEPSEGSAPGTSESATPESGPGSEPATSGSETPGSEPATSGSETPGSPAGSPTSTEEGTSESATPESGPGTSTEPSEGSAPGTSTEPSEGSAPGSPAGSPTSTEEGTSTEPSEGSAPGTSTEPSEGSAPGTSESATPESGPGTSTEPSEGSAPGTSESATPESGPGSEPATSGSETPGTSTEPSEGSAPGTSTEPSEGSAPGTSESATPESGPGTSESATPESGPGSPAGSPTSTEEGTSESATPESGPGSEPATSGSETPGTSESATPESGPGTSTEPSEGSAPGTSTEPSEGSAPGTSTEPSEGSAPGTSTEPSEGSAPGTSTEPSEGSAPGTSTEPSEGSAPGSPAGSPTSTEEGTSTEPSEGSAPGTSESATPESGPGSEPATSGSETPGTSESATPESGPGSEPATSGSETPGTSESATPESGPGTSTEPSEGSAPGTSESATPESGPGSPAGSPTSTEEGSPAGSPTSTEEGSPAGSPTSTEEGTSESATPESGPGTSTEPSEGSAPGFTLSLDVPTNIMNLLFNIAKAKNLRAQAAANAHLMAQI

SEQ ID NO: 2194 - protein, 658 aa, Artificial Sequence
  Description of Artificial Sequence: Synthetic polypeptide
SLRRSSCFGGRMDRIGAQSGLGCNSFRYGGSPAGSPTSTEEGTSESATPESGPGTSTEPSEGSAPGSPAGSPTSTEEGTSTEPSEGSAPGTSTEPSEGSAPGTSESATPESGPGSEPATSGSETPGSEPATSGSETPGSPAGSPTSTEEGTSESATPESGPGTSTEPSEGSAPGTSTEPSEGSAPGSPAGSPTSTEEGTSTEPSEGSAPGTSTEPSEGSAPGTSESATPESGPGTSTEPSEGSAPGTSESATPESGPGSEPATSGSETPGTSTEPSEGSAPGTSTEPSEGSAPGTSESATPESGPGTSESATPESGPGSPAGSPTSTEEGTSESATPESGPGSEPATSGSETPGTSESATPESGPGTSTEPSEGSAPGTSTEPSEGSAPGTSTEPSEGSAPGTSTEPSEGSAPGTSTEPSEGSAPGTSTEPSEGSAPGSPAGSPTSTEEGTSTEPSEGSAPGTSESATPESGPGSEPATSGSETPGTSESATPESGPGSEPATSGSETPGTSESATPESGPGTSTEPSEGSAPGTSESATPESGPGSPAGSPTSTEEGSPAGSPTSTEEGSPAGSPTSTEEGTSESATPESGPGTSTEPSEGSAPGYRQSMNNFQGLRSFGCRFGTCTVQKLAHQIYQFTDKDKDNVAPRSKISPQGY

SEQ ID NO: 2195 - protein, 662 aa, Artificial Sequence
  Description of Artificial Sequence: Synthetic polypeptide
SPKMVQGSGGFGRKMDRISSSSGLGCKVLRRHGGSPAGSPTSTEEGTSESATPESGPGTSTEPSEGSAPGSPAGSPTSTEEGTSTEPSEGSAPGTSTEPSEGSAPGTSESATPESGPGSEPATSGSETPGSEPATSGSETPGSPAGSPTSTEEGTSESATPESGPGTSTEPSEGSAPGTSTEPSEGSAPGSPAGSPTSTEEGTSTEPSEGSAPGTSTEPSEGSAPGTSESATPESGPGTSTEPSEGSAPGTSESATPESGPGSEPATSGSETPGTSTEPSEGSAPGTSTEPSEGSAPGTSESATPESGPGTSESATPESGPGSPAGSPTSTEEGTSESATPESGPGSEPATSGSETPGTSESATPESGPGTSTEPSEGSAPGTSTEPSEGSAPGTSTEPSEGSAPGTSTEPSEGSAPGTSTEPSEGSAPGTSTEPSEGSAPGSPAGSPTSTEEGTSTEPSEGSAPGTSESATPESGPGSEPATSGSETPGTSESATPESGPGSEPATSGSETPGTSESATPESGPGTSTEPSEGSAPGTSESATPESGPGSPAGSPTSTEEGSPAGSPTSTEEGSPAGSPTSTEEGTSESATPESGPGTSTEPSEGSAPGYRQSMNNFQGLRSFGCRFGTCTVQKLAHQIYQFTDKDKDNVAPRSKISPQGY

SEQ ID NO: 2196 - protein, 652 aa, Artificial Sequence
  Description of Artificial Sequence: Synthetic polypeptide
GLSKGCFGLKLDRIGSMSGLGCGGSPAGSPTSTEEGTSESATPESGPGTSTEPSEGSAPGSPAGSPTSTEEGTSTEPSEGSAPGTSTEPSEGSAPGTSESATPESGPGSEPATSGSETPGSEPATSGSETPGSPAGSPTSTEEGTSESATPESGPGTSTEPSEGSAPGTSTEPSEGSAPGSPAGSPTSTEEGTSTEPSEGSAPGTSTEPSEGSAPGTSESATPESGPGTSTEPSEGSAPGTSESATPESGPGSEPATSGSETPGTSTEPSEGSAPGTSTEPSEGSAPGTSESATPESGPGTSESATPESGPGSPAGSPTSTEEGTSESATPESGPGSEPATSGSETPGTSESATPESGPGTSTEPSEGSAPGTSTEPSEGSAPGTSTEPSEGSAPGTSTEPSEGSAPGTSTEPSEGSAPGTSTEPSEGSAPGSPAGSPTSTEEGTSTEPSEGSAPGTSESATPESGPGSEPATSGSETPGTSESATPESGPGSEPATSGSETPGTSESATPESGPGTSTEPSEGSAPGTSESATPESGPGSPAGSPTSTEEGSPAGSPTSTEEGSPAGSPTSTEEGTSESATPESGPGTSTEPSEGSAPGYRQSMNNFQGLRSFGCRFGTCTVQKLAHQIYQFTDKDKDNVAPRSKISPQGY

SEQ ID NO: 2197 - protein, 662 aa, Artificial Sequence
  Description of Artificial Sequence: Synthetic polypeptide
TAPRSLRRSSCFGGRMDRIGAQSGLGCNSFRYGGSPAGSPTSTEEGTSESATPESGPGTSTEPSEGSAPGSPAGSPTSTEEGTSTEPSEGSAPGTSTEPSEGSAPGTSESATPESGPGSEPATSGSETPGSEPATSGSETPGSPAGSPTSTEEGTSESATPESGPGTSTEPSEGSAPGTSTEPSEGSAPGSPAGSPTSTEEGTSTEPSEGSAPGTSTEPSEGSAPGTSESATPESGPGTSTEPSEGSAPGTSESATPESGPGSEPATSGSETPGTSTEPSEGSAPGTSTEPSEGSAPGTSESATPESGPGTSESATPESGPGSPAGSPTSTEEGTSESATPESGPGSEPATSGSETPGTSESATPESGPGTSTEPSEGSAPGTSTEPSEGSAPGTSTEPSEGSAPGTSTEPSEGSAPGTSTEPSEGSAPGTSTEPSEGSAPGSPAGSPTSTEEGTSTEPSEGSAPGTSESATPESGPGSEPATSGSETPGTSESATPESGPGSEPATSGSETPGTSESATPESGPGTSTEPSEGSAPGTSESATPESGPGSPAGSPTSTEEGSPAGSPTSTEEGSPAGSPTSTEEGTSESATPESGPGTSTEPSEGSAPGYRQSMNNFQGLRSFGCRFGTCTVQKLAHQIYQFTDKDKDNVAPRSKISPQGY

SEQ ID NO: 2198 - protein, 671 aa, Artificial Sequence
  Description of Artificial Sequence: Synthetic polypeptide
IVLSLDVPIGLLQILLEQARARAAREQATTNARILARVGHCGGSPAGSPTSTEEGTSESATPESGPGTSTEPSEGSAPGSPAGSPTSTEEGTSTEPSEGSAPGTSTEPSEGSAPGTSESATPESGPGSEPATSGSETPGSEPATSGSETPGSPAGSPTSTEEGTSESATPESGPGTSTEPSEGSAPGTSTEPSEGSAPGSPAGSPTSTEEGTSTEPSEGSAPGTSTEPSEGSAPGTSESATPESGPGTSTEPSEGSAPGTSESATPESGPGSEPATSGSETPGTSTEPSEGSAPGTSTEPSEGSAPGTSESATPESGPGTSESATPESGPGSPAGSPTSTEEGTSESATPESGPGSEPATSGSETPGTSESATPESGPGTSTEPSEGSAPGTSTEPSEGSAPGTSTEPSEGSAPGTSTEPSEGSAPGTSTEPSEGSAPGTSTEPSEGSAPGSPAGSPTSTEEGTSTEPSEGSAPGTSESATPESGPGSEPATSGSETPGTSESATPESGPGSEPATSGSETPGTSESATPESGPGTSTEPSEGSAPGTSESATPESGPGSPAGSPTSTEEGSPAGSPTSTEEGSPAGSPTSTEEGTSESATPESGPGTSTEPSEGSAPGYRQSMNNFQGLRSFGCRFGTCTVQKLAHQIYQFTDKDKDNVAPRSKISPQGY

SEQ ID NO: 2199 - protein, 668 aa, Artificial Sequence
  Description of Artificial Sequence: Synthetic polypeptide
FTLSLDVPTNIMNLLFNIAKAKNLRAQAAANAHLMAQIGGSPAGSPTSTEEGTSESATPESGPGTSTEPSEGSAPGSPAGSPTSTEEGTSTEPSEGSAPGTSTEPSEGSAPGTSESATPESGPGSEPATSGSETPGSEPATSGSETPGSPAGSPTSTEEGTSESATPESGPGTSTEPSEGSAPGTSTEPSEGSAPGSPAGSPTSTEEGTSTEPSEGSAPGTSTEPSEGSAPGTSESATPESGPGTSTEPSEGSAPGTSESATPESGPGSEPATSGSETPGTSTEPSEGSAPGTSTEPSEGSAPGTSESATPESGPGTSESATPESGPGSPAGSPTSTEEGTSESATPESGPGSEPATSGSETPGTSESATPESGPGTSTEPSEGSAPGTSTEPSEGSAPGTSTEPSEGSAPGTSTEPSEGSAPGTSTEPSEGSAPGTSTEPSEGSAPGSPAGSPTSTEEGTSTEPSEGSAPGTSESATPESGPGSEPATSGSETPGTSESATPESGPGSEPATSGSETPGTSESATPESGPGTSTEPSEGSAPGTSESATPESGPGSPAGSPTSTEEGSPAGSPTSTEEGSPAGSPTSTEEGTSESATPESGPGTSTEPSEGSAPGYRQSMNNFQGLRSFGCRFGTCTVQKLAHQIYQFTDKDKDNVAPRSKISPQGY

SEQ ID NO: 2200 - protein, 638 aa, Artificial Sequence
  Description of Artificial Sequence: Synthetic polypeptide
SLRRSSCFGGRMDRIGAQSGLGCNSFRYGGSPAGSPTSTEEGTSESATPESGPGTSTEPSEGSAPGSPAGSPTSTEEGTSTEPSEGSAPGTSTEPSEGSAPGTSESATPESGPGSEPATSGSETPGSEPATSGSETPGSPAGSPTSTEEGTSESATPESGPGTSTEPSEGSAPGTSTEPSEGSAPGSPAGSPTSTEEGTSTEPSEGSAPGTSTEPSEGSAPGTSESATPESGPGTSTEPSEGSAPGTSESATPESGPGSEPATSGSETPGTSTEPSEGSAPGTSTEPSEGSAPGTSESATPESGPGTSESATPESGPGSPAGSPTSTEEGTSESATPESGPGSEPATSGSETPGTSESATPESGPGTSTEPSEGSAPGTSTEPSEGSAPGTSTEPSEGSAPGTSTEPSEGSAPGTSTEPSEGSAPGTSTEPSEGSAPGSPAGSPTSTEEGTSTEPSEGSAPGTSESATPESGPGSEPATSGSETPGTSESATPESGPGSEPATSGSETPGTSESATPESGPGTSTEPSEGSAPGTSESATPESGPGSPAGSPTSTEEGSPAGSPTSTEEGSPAGSPTSTEEGTSESATPESGPGTSTEPSEGSAPGTAPRSLRRSSCFGGRMDRIGAQSGLGCNSFRY

SEQ ID NO: 2201 - protein, 647 aa, Artificial Sequence
  Description of Artificial Sequence: Synthetic polypeptide
SLRRSSCFGGRMDRIGAQSGLGCNSFRYGGSPAGSPTSTEEGTSESATPESGPGTSTEPSEGSAPGSPAGSPTSTEEGTSTEPSEGSAPGTSTEPSEGSAPGTSESATPESGPGSEPATSGSETPGSEPATSGSETPGSPAGSPTSTEEGTSESATPESGPGTSTEPSEGSAPGTSTEPSEGSAPGSPAGSPTSTEEGTSTEPSEGSAPGTSTEPSEGSAPGTSESATPESGPGTSTEPSEGSAPGTSESATPESGPGSEPATSGSETPGTSTEPSEGSAPGTSTEPSEGSAPGTSESATPESGPGTSESATPESGPGSPAGSPTSTEEGTSESATPESGPGSEPATSGSETPGTSESATPESGPGTSTEPSEGSAPGTSTEPSEGSAPGTSTEPSEGSAPGTSTEPSEGSAPGTSTEPSEGSAPGTSTEPSEGSAPGSPAGSPTSTEEGTSTEPSEGSAPGTSESATPESGPGSEPATSGSETPGTSESATPESGPGSEPATSGSETPGTSESATPESGPGTSTEPSEGSAPGTSESATPESGPGSPAGSPTSTEEGSPAGSPTSTEEGSPAGSPTSTEEGTSESATPESGPGTSTEPSEGSAPGIVLSLDVPIGLLQILLEQARARAAREQATTNARILARVGHC

SEQ ID NO: 2202 - protein, 644 aa, Artificial Sequence
  Description of Artificial Sequence: Synthetic polypeptide
SLRRSSCFGGRMDRIGAQSGLGCNSFRYGGSPAGSPTSTEEGTSESATPESGPGTSTEPSEGSAPGSPAGSPTSTEEGTSTEPSEGSAPGTSTEPSEGSAPGTSESATPESGPGSEPATSGSETPGSEPATSGSETPGSPAGSPTSTEEGTSESATPESGPGTSTEPSEGSAPGTSTEPSEGSAPGSPAGSPTSTEEGTSTEPSEGSAPGTSTEPSEGSAPGTSESATPESGPGTSTEPSEGSAPGTSESATPESGPGSEPATSGSETPGTSTEPSEGSAPGTSTEPSEGSAPGTSESATPESGPGTSESATPESGPGSPAGSPTSTEEGTSESATPESGPGSEPATSGSETPGTSESATPESGPGTSTEPSEGSAPGTSTEPSEGSAPGTSTEPSEGSAPGTSTEPSEGSAPGTSTEPSEGSAPGTSTEPSEGSAPGSPAGSPTSTEEGTSTEPSEGSAPGTSESATPESGPGSEPATSGSETPGTSESATPESGPGSEPATSGSETPGTSESATPESGPGTSTEPSEGSAPGTSESATPESGPGSPAGSPTSTEEGSPAGSPTSTEEGSPAGSPTSTEEGTSESATPESGPGTSTEPSEGSAPGFTLSLDVPTNIMNLLFNIAKAKNLRAQAAANAHLMAQI

SEQ ID NO: 2203 - protein, 638 aa, Artificial Sequence
  Description of Artificial Sequence: Synthetic polypeptide
TAPRSLRRSSCFGGRMDRIGAQSGLGCNSFRYGGSPAGSPTSTEEGTSESATPESGPGTSTEPSEGSAPGSPAGSPTSTEEGTSTEPSEGSAPGTSTEPSEGSAPGTSESATPESGPGSEPATSGSETPGSEPATSGSETPGSPAGSPTSTEEGTSESATPESGPGTSTEPSEGSAPGTSTEPSEGSAPGSPAGSPTSTEEGTSTEPSEGSAPGTSTEPSEGSAPGTSESATPESGPGTSTEPSEGSAPGTSESATPESGPGSEPATSGSETPGTSTEPSEGSAPGTSTEPSEGSAPGTSESATPESGPGTSESATPESGPGSPAGSPTSTEEGTSESATPESGPGSEPATSGSETPGTSESATPESGPGTSTEPSEGSAPGTSTEPSEGSAPGTSTEPSEGSAPGTSTEPSEGSAPGTSTEPSEGSAPGTSTEPSEGSAPGSPAGSPTSTEEGTSTEPSEGSAPGTSESATPESGPGSEPATSGSETPGTSESATPESGPGSEPATSGSETPGTSESATPESGPGTSTEPSEGSAPGTSESATPESGPGSPAGSPTSTEEGSPAGSPTSTEEGSPAGSPTSTEEGTSESATPESGPGTSTEPSEGSAPGSLRRSSCFGGRMDRIGAQSGLGCNSFRY

SEQ ID NO: 2204 - protein, 647 aa, Artificial Sequence
  Description of Artificial Sequence: Synthetic polypeptide
IVLSLDVPIGLLQILLEQARARAAREQATTNARILARVGHCGGSPAGSPTSTEEGTSESATPESGPGTSTEPSEGSAPGSPAGSPTSTEEGTSTEPSEGSAPGTSTEPSEGSAPGTSESATPESGPGSEPATSGSETPGSEPATSGSETPGSPAGSPTSTEEGTSESATPESGPGTSTEPSEGSAPGTSTEPSEGSAPGSPAGSPTSTEEGTSTEPSEGSAPGTSTEPSEGSAPGTSESATPESGPGTSTEPSEGSAPGTSESATPESGPGSEPATSGSETPGTSTEPSEGSAPGTSTEPSEGSAPGTSESATPESGPGTSESATPESGPGSPAGSPTSTEEGTSESATPESGPGSEPATSGSETPGTSESATPESGPGTSTEPSEGSAPGTSTEPSEGSAPGTSTEPSEGSAPGTSTEPSEGSAPGTSTEPSEGSAPGTSTEPSEGSAPGSPAGSPTSTEEGTSTEPSEGSAPGTSESATPESGPGSEPATSGSETPGTSESATPESGPGSEPATSGSETPGTSESATPESGPGTSTEPSEGSAPGTSESATPESGPGSPAGSPTSTEEGSPAGSPTSTEEGSPAGSPTSTEEGTSESATPESGPGTSTEPSEGSAPGSLRRSSCFGGRMDRIGAQSGLGCNSFRY

SEQ ID NO: 2205 - protein, 644 aa, Artificial Sequence
  Description of Artificial Sequence: Synthetic polypeptide
FTLSLDVPTNIMNLLFNIAKAKNLRAQAAANAHLMAQIGGSPAGSPTSTEEGTSESATPESGPGTSTEPSEGSAPGSPAGSPTSTEEGTSTEPSEGSAPGTSTEPSEGSAPGTSESATPESGPGSEPATSGSETPGSEPATSGSETPGSPAGSPTSTEEGTSESATPESGPGTSTEPSEGSAPGTSTEPSEGSAPGSPAGSPTSTEEGTSTEPSEGSAPGTSTEPSEGSAPGTSESATPESGPGTSTEPSEGSAPGTSESATPESGPGSEPATSGSETPGTSTEPSEGSAPGTSTEPSEGSAPGTSESATPESGPGTSESATPESGPGSPAGSPTSTEEGTSESATPESGPGSEPATSGSETPGTSESATPESGPGTSTEPSEGSAPGTSTEPSEGSAPGTSTEPSEGSAPGTSTEPSEGSAPGTSTEPSEGSAPGTSTEPSEGSAPGSPAGSPTSTEEGTSTEPSEGSAPGTSESATPESGPGSEPATSGSETPGTSESATPESGPGSEPATSGSETPGTSESATPESGPGTSTEPSEGSAPGTSESATPESGPGSPAGSPTSTEEGSPAGSPTSTEEGSPAGSPTSTEEGTSESATPESGPGTSTEPSEGSAPGSLRRSSCFGGRMDRIGAQSGLGCNSFRY

SEQ ID NO: 2206 - protein, 642 aa, Artificial Sequence
  Description of Artificial Sequence: Synthetic polypeptide
SPKMVQGSGGFGRKMDRISSSSGLGCKVLRRHGGSPAGSPTSTEEGTSESATPESGPGTSTEPSEGSAPGSPAGSPTSTEEGTSTEPSEGSAPGTSTEPSEGSAPGTSESATPESGPGSEPATSGSETPGSEPATSGSETPGSPAGSPTSTEEGTSESATPESGPGTSTEPSEGSAPGTSTEPSEGSAPGSPAGSPTSTEEGTSTEPSEGSAPGTSTEPSEGSAPGTSESATPESGPGTSTEPSEGSAPGTSESATPESGPGSEPATSGSETPGTSTEPSEGSAPGTSTEPSEGSAPGTSESATPESGPGTSESATPESGPGSPAGSPTSTEEGTSESATPESGPGSEPATSGSETPGTSESATPESGPGTSTEPSEGSAPGTSTEPSEGSAPGTSTEPSEGSAPGTSTEPSEGSAPGTSTEPSEGSAPGTSTEPSEGSAPGSPAGSPTSTEEGTSTEPSEGSAPGTSESATPESGPGSEPATSGSETPGTSESATPESGPGSEPATSGSETPGTSESATPESGPGTSTEPSEGSAPGTSESATPESGPGSPAGSPTSTEEGSPAGSPTSTEEGSPAGSPTSTEEGTSESATPESGPGTSTEPSEGSAPGTAPRSLRRSSCFGGRMDRIGAQSGLGCNSFRY

SEQ ID NO: 2207 - protein, 651 aa, Artificial Sequence
  Description of Artificial Sequence: Synthetic polypeptide
SPKMVQGSGGFGRKMDRISSSSGLGCKVLRRHGGSPAGSPTSTEEGTSESATPESGPGTSTEPSEGSAPGSPAGSPTSTEEGTSTEPSEGSAPGTSTEPSEGSAPGTSESATPESGPGSEPATSGSETPGSEPATSGSETPGSPAGSPTSTEEGTSESATPESGPGTSTEPSEGSAPGTSTEPSEGSAPGSPAGSPTSTEEGTSTEPSEGSAPGTSTEPSEGSAPGTSESATPESGPGTSTEPSEGSAPGTSESATPESGPGSEPATSGSETPGTSTEPSEGSAPGTSTEPSEGSAPGTSESATPESGPGTSESATPESGPGSPAGSPTSTEEGTSESATPESGPGSEPATSGSETPGTSESATPESGPGTSTEPSEGSAPGTSTEPSEGSAPGTSTEPSEGSAPGTSTEPSEGSAPGTSTEPSEGSAPGTSTEPSEGSAPGSPAGSPTSTEEGTSTEPSEGSAPGTSESATPESGPGSEPATSGSETPGTSESATPESGPGSEPATSGSETPGTSESATPESGPGTSTEPSEGSAPGTSESATPESGPGSPAGSPTSTEEGSPAGSPTSTEEGSPAGSPTSTEEGTSESATPESGPGTSTEPSEGSAPGIVLSLDVPIGLLQILLEQARARAAREQATTNARILARVGHC

SEQ ID NO: 2208 - protein, 648 aa, Artificial Sequence
  Description of Artificial Sequence: Synthetic polypeptide
SPKMVQGSGGFGRKMDRISSSSGLGCKVLRRHGGSPAGSPTSTEEGTSESATPESGPGTSTEPSEGSAPGSPAGSPTSTEEGTSTEPSEGSAPGTSTEPSEGSAPGTSESATPESGPGSEPATSGSETPGSEPATSGSETPGSPAGSPTSTEEGTSESATPESGPGTSTEPSEGSAPGTSTEPSEGSAPGSPAGSPTSTEEGTSTEPSEGSAPGTSTEPSEGSAPGTSESATPESGPGTSTEPSEGSAPGTSESATPESGPGSEPATSGSETPGTSTEPSEGSAPGTSTEPSEGSAPGTSESATPESGPGTSESATPESGPGSPAGSPTSTEEGTSESATPESGPGSEPATSGSETPGTSESATPESGPGTSTEPSEGSAPGTSTEPSEGSAPGTSTEPSEGSAPGTSTEPSEGSAPGTSTEPSEGSAPGTSTEPSEGSAPGSPAGSPTSTEEGTSTEPSEGSAPGTSESATPESGPGSEPATSGSETPGTSESATPESGPGSEPATSGSETPGTSESATPESGPGTSTEPSEGSAPGTSESATPESGPGSPAGSPTSTEEGSPAGSPTSTEEGSPAGSPTSTEEGTSESATPESGPGTSTEPSEGSAPGFTLSLDVPTNIMNLLFNIAKAKNLRAQAAANAHLMAQI

SEQ ID NO: 2209 - protein, 642 aa, Artificial Sequence
  Description of Artificial Sequence: Synthetic polypeptide
TAPRSLRRSSCFGGRMDRIGAQSGLGCNSFRYGGSPAGSPTSTEEGTSESATPESGPGTSTEPSEGSAPGSPAGSPTSTEEGTSTEPSEGSAPGTSTEPSEGSAPGTSESATPESGPGSEPATSGSETPGSEPATSGSETPGSPAGSPTSTEEGTSESATPESGPGTSTEPSEGSAPGTSTEPSEGSAPGSPAGSPTSTEEGTSTEPSEGSAPGTSTEPSEGSAPGTSESATPESGPGTSTEPSEGSAPGTSESATPESGPGSEPATSGSETPGTSTEPSEGSAPGTSTEPSEGSAPGTSESATPESGPGTSESATPESGPGSPAGSPTSTEEGTSESATPESGPGSEPATSGSETPGTSESATPESGPGTSTEPSEGSAPGTSTEPSEGSAPGTSTEPSEGSAPGTSTEPSEGSAPGTSTEPSEGSAPGTSTEPSEGSAPGSPAGSPTSTEEGTSTEPSEGSAPGTSESATPESGPGSEPATSGSETPGTSESATPESGPGSEPATSGSETPGTSESATPESGPGTSTEPSEGSAPGTSESATPESGPGSPAGSPTSTEEGSPAGSPTSTEEGSPAGSPTSTEEGTSESATPESGPGTSTEPSEGSAPGSPKMVQGSGGFGRKMDRISSSSGLGCKVLRRH

SEQ ID NO: 2210 - protein, 651 aa, Artificial Sequence
  Description of Artificial Sequence: Synthetic polypeptide
IVLSLDVPIGLLQILLEQARARAAREQATTNARILARVGHCGGSPAGSPTSTEEGTSESATPESGPGTSTEPSEGSAPGSPAGSPTSTEEGTSTEPSEGSAPGTSTEPSEGSAPGTSESATPESGPGSEPATSGSETPGSEPATSGSETPGSPAGSPTSTEEGTSESATPESGPGTSTEPSEGSAPGTSTEPSEGSAPGSPAGSPTSTEEGTSTEPSEGSAPGTSTEPSEGSAPGTSESATPESGPGTSTEPSEGSAPGTSESATPESGPGSEPATSGSETPGTSTEPSEGSAPGTSTEPSEGSAPGTSESATPESGPGTSESATPESGPGSPAGSPTSTEEGTSESATPESGPGSEPATSGSETPGTSESATPESGPGTSTEPSEGSAPGTSTEPSEGSAPGTSTEPSEGSAPGTSTEPSEGSAPGTSTEPSEGSAPGTSTEPSEGSAPGSPAGSPTSTEEGTSTEPSEGSAPGTSESATPESGPGSEPATSGSETPGTSESATPESGPGSEPATSGSETPGTSESATPESGPGTSTEPSEGSAPGTSESATPESGPGSPAGSPTSTEEGSPAGSPTSTEEGSPAGSPTSTEEGTSESATPESGPGTSTEPSEGSAPGSPKMVQGSGGFGRKMDRISSSSGLGCKVLRRH

SEQ ID NO: 2211 - protein, 648 aa, Artificial Sequence
  Description of Artificial Sequence: Synthetic polypeptide
FTLSLDVPTNIMNLLFNIAKAKNLRAQAAANAHLMAQIGGSPAGSPTSTEEGTSESATPESGPGTSTEPSEGSAPGSPAGSPTSTEEGTSTEPSEGSAPGTSTEPSEGSAPGTSESATPESGPGSEPATSGSETPGSEPATSGSETPGSPAGSPTSTEEGTSESATPESGPGTSTEPSEGSAPGTSTEPSEGSAPGSPAGSPTSTEEGTSTEPSEGSAPGTSTEPSEGSAPGTSESATPESGPGTSTEPSEGSAPGTSESATPESGPGSEPATSGSETPGTSTEPSEGSAPGTSTEPSEGSAPGTSESATPESGPGTSESATPESGPGSPAGSPTSTEEGTSESATPESGPGSEPATSGSETPGTSESATPESGPGTSTEPSEGSAPGTSTEPSEGSAPGTSTEPSEGSAPGTSTEPSEGSAPGTSTEPSEGSAPGTSTEPSEGSAPGSPAGSPTSTEEGTSTEPSEGSAPGTSESATPESGPGSEPATSGSETPGTSESATPESGPGSEPATSGSETPGTSESATPESGPGTSTEPSEGSAPGTSESATPESGPGSPAGSPTSTEEGSPAGSPTSTEEGSPAGSPTSTEEGTSESATPESGPGTSTEPSEGSAPGSPKMVQGSGGFGRKMDRISSSSGLGCKVLRRH

SEQ ID NO: 2212 - protein, 651 aa, Artificial Sequence
  Description of Artificial Sequence: Synthetic polypeptide
TAPRSLRRSSCFGGRMDRIGAQSGLGCNSFRYGGSPAGSPTSTEEGTSESATPESGPGTSTEPSEGSAPGSPAGSPTSTEEGTSTEPSEGSAPGTSTEPSEGSAPGTSESATPESGPGSEPATSGSETPGSEPATSGSETPGSPAGSPTSTEEGTSESATPESGPGTSTEPSEGSAPGTSTEPSEGSAPGSPAGSPTSTEEGTSTEPSEGSAPGTSTEPSEGSAPGTSESATPESGPGTSTEPSEGSAPGTSESATPESGPGSEPATSGSETPGTSTEPSEGSAPGTSTEPSEGSAPGTSESATPESGPGTSESATPESGPGSPAGSPTSTEEGTSESATPESGPGSEPATSGSETPGTSESATPESGPGTSTEPSEGSAPGTSTEPSEGSAPGTSTEPSEGSAPGTSTEPSEGSAPGTSTEPSEGSAPGTSTEPSEGSAPGSPAGSPTSTEEGTSTEPSEGSAPGTSESATPESGPGSEPATSGSETPGTSESATPESGPGSEPATSGSETPGTSESATPESGPGTSTEPSEGSAPGTSESATPESGPGSPAGSPTSTEEGSPAGSPTSTEEGSPAGSPTSTEEGTSESATPESGPGTSTEPSEGSAPGIVLSLDVPIGLLQILLEQARARAAREQATTNARILARVGHC

SEQ ID NO: 2213 - protein, 648 aa, Artificial Sequence
  Description of Artificial Sequence: Synthetic polypeptide
TAPRSLRRSSCFGGRMDRIGAQSGLGCNSFRYGGSPAGSPTSTEEGTSESATPESGPGTSTEPSEGSAPGSPAGSPTSTEEGTSTEPSEGSAPGTSTEPSEGSAPGTSESATPESGPGSEPATSGSETPGSEPATSGSETPGSPAGSPTSTEEGTSESATPESGPGTSTEPSEGSAPGTSTEPSEGSAPGSPAGSPTSTEEGTSTEPSEGSAPGTSTEPSEGSAPGTSESATPESGPGTSTEPSEGSAPGTSESATPESGPGSEPATSGSETPGTSTEPSEGSAPGTSTEPSEGSAPGTSESATPESGPGTSESATPESGPGSPAGSPTSTEEGTSESATPESGPGSEPATSGSETPGTSESATPESGPGTSTEPSEGSAPGTSTEPSEGSAPGTSTEPSEGSAPGTSTEPSEGSAPGTSTEPSEGSAPGTSTEPSEGSAPGSPAGSPTSTEEGTSTEPSEGSAPGTSESATPESGPGSEPATSGSETPGTSESATPESGPGSEPATSGSETPGTSESATPESGPGTSTEPSEGSAPGTSESATPESGPGSPAGSPTSTEEGSPAGSPTSTEEGSPAGSPTSTEEGTSESATPESGPGTSTEPSEGSAPGFTLSLDVPTNIMNLLFNIAKAKNLRAQAAANAHLMAQI

SEQ ID NO: 2214 - protein, 651 aa, Artificial Sequence
  Description of Artificial Sequence: Synthetic polypeptide
IVLSLDVPIGLLQILLEQARARAAREQATTNARILARVGHCGGSPAGSPTSTEEGTSESATPESGPGTSTEPSEGSAPGSPAGSPTSTEEGTSTEPSEGSAPGTSTEPSEGSAPGTSESATPESGPGSEPATSGSETPGSEPATSGSETPGSPAGSPTSTEEGTSESATPESGPGTSTEPSEGSAPGTSTEPSEGSAPGSPAGSPTSTEEGTSTEPSEGSAPGTSTEPSEGSAPGTSESATPESGPGTSTEPSEGSAPGTSESATPESGPGSEPATSGSETPGTSTEPSEGSAPGTSTEPSEGSAPGTSESATPESGPGTSESATPESGPGSPAGSPTSTEEGTSESATPESGPGSEPATSGSETPGTSESATPESGPGTSTEPSEGSAPGTSTEPSEGSAPGTSTEPSEGSAPGTSTEPSEGSAPGTSTEPSEGSAPGTSTEPSEGSAPGSPAGSPTSTEEGTSTEPSEGSAPGTSESATPESGPGSEPATSGSETPGTSESATPESGPGSEPATSGSETPGTSESATPESGPGTSTEPSEGSAPGTSESATPESGPGSPAGSPTSTEEGSPAGSPTSTEEGSPAGSPTSTEEGTSESATPESGPGTSTEPSEGSAPGTAPRSLRRSSCFGGRMDRIGAQSGLGCNSFRY

SEQ ID NO: 2215 - protein, 648 aa, Artificial Sequence
  Description of Artificial Sequence: Synthetic polypeptide
FTLSLDVPTNIMNLLFNIAKAKNLRAQAAANAHLMAQIGGSPAGSPTSTEEGTSESATPESGPGTSTEPSEGSAPGSPAGSPTSTEEGTSTEPSEGSAPGTSTEPSEGSAPGTSESATPESGPGSEPATSGSETPGSEPATSGSETPGSPAGSPTSTEEGTSESATPESGPGTSTEPSEGSAPGTSTEPSEGSAPGSPAGSPTSTEEGTSTEPSEGSAPGTSTEPSEGSAPGTSESATPESGPGTSTEPSEGSAPGTSESATPESGPGSEPATSGSETPGTSTEPSEGSAPGTSTEPSEGSAPGTSESATPESGPGTSESATPESGPGSPAGSPTSTEEGTSESATPESGPGSEPATSGSETPGTSESATPESGPGTSTEPSEGSAPGTSTEPSEGSAPGTSTEPSEGSAPGTSTEPSEGSAPGTSTEPSEGSAPGTSTEPSEGSAPGSPAGSPTSTEEGTSTEPSEGSAPGTSESATPESGPGSEPATSGSETPGTSESATPESGPGSEPATSGSETPGTSESATPESGPGTSTEPSEGSAPGTSESATPESGPGSPAGSPTSTEEGSPAGSPTSTEEGSPAGSPTSTEEGTSESATPESGPGTSTEPSEGSAPGTAPRSLRRSSCFGGRMDRIGAQSGLGCNSFRY

SEQ ID NO: 2216 - protein, 957 aa, Artificial Sequence
  Description of Artificial Sequence: Synthetic polypeptide
YRQSMNNFQGLRSFGCRFGTCTVQKLAHQIYQFTDKDKDNVAPRSKISPQGYGSLRRSSCFGGRMDRIGAQSGLGCNSFRYGGTSTEPSEGSAPGSEPATSGSETPGSPAGSPTSTEEGSTSSTAESPGPGTSTPESGSASPGSTSESPSGTAPGSTSESPSGTAPGTSTPESGSASPGTSTPESGSASPGSEPATSGSETPGTSESATPESGPGSPAGSPTSTEEGTSTEPSEGSAPGTSESATPESGPGTSTEPSEGSAPGTSTEPSEGSAPGSPAGSPTSTEEGTSTEPSEGSAPGTSTEPSEGSAPGTSESATPESGPGTSESATPESGPGTSTEPSEGSAPGTSTEPSEGSAPGTSESATPESGPGTSTEPSEGSAPGSEPATSGSETPGSPAGSPTSTEEGSSTPSGATGSPGTPGSGTASSSPGSSTPSGATGSPGTSTEPSEGSAPGTSTEPSEGSAPGSEPATSGSETPGSPAGSPTSTEEGSPAGSPTSTEEGTSTEPSEGSAPGASASGAPSTGGTSESATPESGPGSPAGSPTSTEEGSPAGSPTSTEEGSTSSTAESPGPGSTSESPSGTAPGTSPSGESSTAPGTPGSGTASSSPGSSTPSGATGSPGSSPSASTGTGPGSEPATSGSETPGTSESATPESGPGSEPATSGSETPGSTSSTAESPGPGSTSSTAESPGPGTSPSGESSTAPGSEPATSGSETPGSEPATSGSETPGTSTEPSEGSAPGSTSSTAESPGPGTSTPESGSASPGSTSESPSGTAPGTSTEPSEGSAPGTSTEPSEGSAPGTSTEPSEGSAPGSSTPSGATGSPGSSPSASTGTGPGASPGTSSTGSPGSEPATSGSETPGTSESATPESGPGSPAGSPTSTEEGSSTPSGATGSPGSSPSASTGTGPGASPGTSSTGSPGTSESATPESGPGTSTEPSEGSAPGTSTEPSEGSAP

SEQ ID NO: 2217 - protein, 961 aa, Artificial Sequence
  Description of Artificial Sequence: Synthetic polypeptide
YRQSMNNFQGLRSFGCRFGTCTVQKLAHQIYQFTDKDKDNVAPRSKISPQGYGSPKMVQGSGGFGRKMDRISSSSGLGCKVLRRHGGTSTEPSEGSAPGSEPATSGSETPGSPAGSPTSTEEGSTSSTAESPGPGTSTPESGSASPGSTSESPSGTAPGSTSESPSGTAPGTSTPESGSASPGTSTPESGSASPGSEPATSGSETPGTSESATPESGPGSPAGSPTSTEEGTSTEPSEGSAPGTSESATPESGPGTSTEPSEGSAPGTSTEPSEGSAPGSPAGSPTSTEEGTSTEPSEGSAPGTSTEPSEGSAPGTSESATPESGPGTSESATPESGPGTSTEPSEGSAPGTSTEPSEGSAPGTSESATPESGPGTSTEPSEGSAPGSEPATSGSETPGSPAGSPTSTEEGSSTPSGATGSPGTPGSGTASSSPGSSTPSGATGSPGTSTEPSEGSAPGTSTEPSEGSAPGSEPATSGSETPGSPAGSPTSTEEGSPAGSPTSTEEGTSTEPSEGSAPGASASGAPSTGGTSESATPESGPGSPAGSPTSTEEGSPAGSPTSTEEGSTSSTAESPGPGSTSESPSGTAPGTSPSGESSTAPGTPGSGTASSSPGSSTPSGATGSPGSSPSASTGTGPGSEPATSGSETPGTSESATPESGPGSEPATSGSETPGSTSSTAESPGPGSTSSTAESPGPGTSPSGESSTAPGSEPATSGSETPGSEPATSGSETPGTSTEPSEGSAPGSTSSTAESPGPGTSTPESGSASPGSTSESPSGTAPGTSTEPSEGSAPGTSTEPSEGSAPGTSTEPSEGSAPGSSTPSGATGSPGSSPSASTGTGPGASPGTSSTGSPGSEPATSGSETPGTSESATPESGPGSPAGSPTSTEEGSSTPSGATGSPGSSPSASTGTGPGASPGTSSTGSPGTSESATPESGPGTSTEPSEGSAPGTSTEPSEGSAP

SEQ ID NO: 2218 - protein, 951 aa, Artificial Sequence
  Description of Artificial Sequence: Synthetic polypeptide
YRQSMNNFQGLRSFGCRFGTCTVQKLAHQIYQFTDKDKDNVAPRSKISPQGYGGLSKGCFGLKLDRIGSMSGLGCGGTSTEPSEGSAPGSEPATSGSETPGSPAGSPTSTEEGSTSSTAESPGPGTSTPESGSASPGSTSESPSGTAPGSTSESPSGTAPGTSTPESGSASPGTSTPESGSASPGSEPATSGSETPGTSESATPESGPGSPAGSPTSTEEGTSTEPSEGSAPGTSESATPESGPGTSTEPSEGSAPGTSTEPSEGSAPGSPAGSPTSTEEGTSTEPSEGSAPGTSTEPSEGSAPGTSESATPESGPGTSESATPESGPGTSTEPSEGSAPGTSTEPSEGSAPGTSESATPESGPGTSTEPSEGSAPGSEPATSGSETPGSPAGSPTSTEEGSSTPSGATGSPGTPGSGTASSSPGSSTPSGATGSPGTSTEPSEGSAPGTSTEPSEGSAPGSEPATSGSETPGSPAGSPTSTEEGSPAGSPTSTEEGTSTEPSEGSAPGASASGAPSTGGTSESATPESGPGSPAGSPTSTEEGSPAGSPTSTEEGSTSSTAESPGPGSTSESPSGTAPGTSPSGESSTAPGTPGSGTASSSPGSSTPSGATGSPGSSPSASTGTGPGSEPATSGSETPGTSESATPESGPGSEPATSGSETPGSTSSTAESPGPGSTSSTAESPGPGTSPSGESSTAPGSEPATSGSETPGSEPATSGSETPGTSTEPSEGSAPGSTSSTAESPGPGTSTPESGSASPGSTSESPSGTAPGTSTEPSEGSAPGTSTEPSEGSAPGTSTEPSEGSAPGSSTPSGATGSPGSSPSASTGTGPGASPGTSSTGSPGSEPATSGSETPGTSESATPESGPGSPAGSPTSTEEGSSTPSGATGSPGSSPSASTGTGPGASPGTSSTGSPGTSESATPESGPGTSTEPSEGSAPGTSTEPSEGSAP

SEQ ID NO: 2219 - protein, 961 aa, Artificial Sequence
  Description of Artificial Sequence: Synthetic polypeptide
YRQSMNNFQGLRSFGCRFGTCTVQKLAHQIYQFTDKDKDNVAPRSKISPQGYGTAPRSLRRSSCFGGRMDRIGAQSGLGCNSFRYGGTSTEPSEGSAPGSEPATSGSETPGSPAGSPTSTEEGSTSSTAESPGPGTSTPESGSASPGSTSESPSGTAPGSTSESPSGTAPGTSTPESGSASPGTSTPESGSASPGSEPATSGSETPGTSESATPESGPGSPAGSPTSTEEGTSTEPSEGSAPGTSESATPESGPGTSTEPSEGSAPGTSTEPSEGSAPGSPAGSPTSTEEGTSTEPSEGSAPGTSTEPSEGSAPGTSESATPESGPGTSESATPESGPGTSTEPSEGSAPGTSTEPSEGSAPGTSESATPESGPGTSTEPSEGSAPGSEPATSGSETPGSPAGSPTSTEEGSSTPSGATGSPGTPGSGTASSSPGSSTPSGATGSPGTSTEPSEGSAPGTSTEPSEGSAPGSEPATSGSETPGSPAGSPTSTEEGSPAGSPTSTEEGTSTEPSEGSAPGASASGAPSTGGTSESATPESGPGSPAGSPTSTEEGSPAGSPTSTEEGSTSSTAESPGPGSTSESPSGTAPGTSPSGESSTAPGTPGSGTASSSPGSSTPSGATGSPGSSPSASTGTGPGSEPATSGSETPGTSESATPESGPGSEPATSGSETPGSTSSTAESPGPGSTSSTAESPGPGTSPSGESSTAPGSEPATSGSETPGSEPATSGSETPGTSTEPSEGSAPGSTSSTAESPGPGTSTPESGSASPGSTSESPSGTAPGTSTEPSEGSAPGTSTEPSEGSAPGTSTEPSEGSAPGSSTPSGATGSPGSSPSASTGTGPGASPGTSSTGSPGSEPATSGSETPGTSESATPESGPGSPAGSPTSTEEGSSTPSGATGSPGSSPSASTGTGPGASPGTSSTGSPGTSESATPESGPGTSTEPSEGSAPGTSTEPSEGSAP

SEQ ID NO: 2220 - protein, 970 aa, Artificial Sequence
  Description of Artificial Sequence: Synthetic polypeptide
YRQSMNNFQGLRSFGCRFGTCTVQKLAHQIYQFTDKDKDNVAPRSKISPQGYGIVLSLDVPIGLLQILLEQARARAAREQATTNARILARVGHCGGTSTEPSEGSAPGSEPATSGSETPGSPAGSPTSTEEGSTSSTAESPGPGTSTPESGSASPGSTSESPSGTAPGSTSESPSGTAPGTSTPESGSASPGTSTPESGSASPGSEPATSGSETPGTSESATPESGPGSPAGSPTSTEEGTSTEPSEGSAPGTSESATPESGPGTSTEPSEGSAPGTSTEPSEGSAPGSPAGSPTSTEEGTSTEPSEGSAPGTSTEPSEGSAPGTSESATPESGPGTSESATPESGPGTSTEPSEGSAPGTSTEPSEGSAPGTSESATPESGPGTSTEPSEGSAPGSEPATSGSETPGSPAGSPTSTEEGSSTPSGATGSPGTPGSGTASSSPGSSTPSGATGSPGTSTEPSEGSAPGTSTEPSEGSAPGSEPATSGSETPGSPAGSPTSTEEGSPAGSPTSTEEGTSTEPSEGSAPGASASGAPSTGGTSESATPESGPGSPAGSPTSTEEGSPAGSPTSTEEGSTSSTAESPGPGSTSESPSGTAPGTSPSGESSTAPGTPGSGTASSSPGSSTPSGATGSPGSSPSASTGTGPGSEPATSGSETPGTSESATPESGPGSEPATSGSETPGSTSSTAESPGPGSTSSTAESPGPGTSPSGESSTAPGSEPATSGSETPGSEPATSGSETPGTSTEPSEGSAPGSTSSTAESPGPGTSTPESGSASPGSTSESPSGTAPGTSTEPSEGSAPGTSTEPSEGSAPGTSTEPSEGSAPGSSTPSGATGSPGSSPSASTGTGPGASPGTSSTGSPGSEPATSGSETPGTSESATPESGPGSPAGSPTSTEEGSSTPSGATGSPGSSPSASTGTGPGASPGTSSTGSPGTSESATPESGPGTSTEPSEGSAPGTSTEPSEGSAP

SEQ ID NO: 2221 - protein, 967 aa, Artificial Sequence
  Description of Artificial Sequence: Synthetic polypeptide
YRQSMNNFQGLRSFGCRFGTCTVQKLAHQIYQFTDKDKDNVAPRSKISPQGYGFTLSLDVPTNIMNLLFNIAKAKNLRAQAAANAHLMAQIGGTSTEPSEGSAPGSEPATSGSETPGSPAGSPTSTEEGSTSSTAESPGPGTSTPESGSASPGSTSESPSGTAPGSTSESPSGTAPGTSTPESGSASPGTSTPESGSASPGSEPATSGSETPGTSESATPESGPGSPAGSPTSTEEGTSTEPSEGSAPGTSESATPESGPGTSTEPSEGSAPGTSTEPSEGSAPGSPAGSPTSTEEGTSTEPSEGSAPGTSTEPSEGSAPGTSESATPESGPGTSESATPESGPGTSTEPSEGSAPGTSTEPSEGSAPGTSESATPESGPGTSTEPSEGSAPGSEPATSGSETPGSPAGSPTSTEEGSSTPSGATGSPGTPGSGTASSSPGSSTPSGATGSPGTSTEPSEGSAPGTSTEPSEGSAPGSEPATSGSETPGSPAGSPTSTEEGSPAGSPTSTEEGTSTEPSEGSAPGASASGAPSTGGTSESATPESGPGSPAGSPTSTEEGSPAGSPTSTEEGSTSSTAESPGPGSTSESPSGTAPGTSPSGESSTAPGTPGSGTASSSPGSSTPSGATGSPGSSPSASTGTGPGSEPATSGSETPGTSESATPESGPGSEPATSGSETPGSTSSTAESPGPGSTSSTAESPGPGTSPSGESSTAPGSEPATSGSETPGSEPATSGSETPGTSTEPSEGSAPGSTSSTAESPGPGTSTPESGSASPGSTSESPSGTAPGTSTEPSEGSAPGTSTEPSEGSAPGTSTEPSEGSAPGSSTPSGATGSPGSSPSASTGTGPGASPGTSSTGSPGSEPATSGSETPGTSESATPESGPGSPAGSPTSTEEGSSTPSGATGSPGSSPSASTGTGPGASPGTSSTGSPGTSESATPESGPGTSTEPSEGSAPGTSTEPSEGSAP

SEQ ID NO: 2222 - protein, 957 aa, Artificial Sequence
  Description of Artificial Sequence: Synthetic polypeptide
SLRRSSCFGGRMDRIGAQSGLGCNSFRYGYRQSMNNFQGLRSFGCRFGTCTVQKLAHQIYQFTDKDKDNVAPRSKISPQGYGGTSTEPSEGSAPGSEPATSGSETPGSPAGSPTSTEEGSTSSTAESPGPGTSTPESGSASPGSTSESPSGTAPGSTSESPSGTAPGTSTPESGSASPGTSTPESGSASPGSEPATSGSETPGTSESATPESGPGSPAGSPTSTEEGTSTEPSEGSAPGTSESATPESGPGTSTEPSEGSAPGTSTEPSEGSAPGSPAGSPTSTEEGTSTEPSEGSAPGTSTEPSEGSAPGTSESATPESGPGTSESATPESGPGTSTEPSEGSAPGTSTEPSEGSAPGTSESATPESGPGTSTEPSEGSAPGSEPATSGSETPGSPAGSPTSTEEGSSTPSGATGSPGTPGSGTASSSPGSSTPSGATGSPGTSTEPSEGSAPGTSTEPSEGSAPGSEPATSGSETPGSPAGSPTSTEEGSPAGSPTSTEEGTSTEPSEGSAPGASASGAPSTGGTSESATPESGPGSPAGSPTSTEEGSPAGSPTSTEEGSTSSTAESPGPGSTSESPSGTAPGTSPSGESSTAPGTPGSGTASSSPGSSTPSGATGSPGSSPSASTGTGPGSEPATSGSETPGTSESATPESGPGSEPATSGSETPGSTSSTAESPGPGSTSSTAESPGPGTSPSGESSTAPGSEPATSGSETPGSEPATSGSETPGTSTEPSEGSAPGSTSSTAESPGPGTSTPESGSASPGSTSESPSGTAPGTSTEPSEGSAPGTSTEPSEGSAPGTSTEPSEGSAPGSSTPSGATGSPGSSPSASTGTGPGASPGTSSTGSPGSEPATSGSETPGTSESATPESGPGSPAGSPTSTEEGSSTPSGATGSPGSSPSASTGTGPGASPGTSSTGSPGTSESATPESGPGTSTEPSEGSAPGTSTEPSEGSAP

SEQ ID NO: 2223 - protein, 961 aa, Artificial Sequence
  Description of Artificial Sequence: Synthetic polypeptide
SPKMVQGSGGFGRKMDRISSSSGLGCKVLRRHGYRQSMNNFQGLRSFGCRFGTCTVQKLAHQIYQFTDKDKDNVAPRSKISPQGYGGTSTEPSEGSAPGSEPATSGSETPGSPAGSPTSTEEGSTSSTAESPGPGTSTPESGSASPGSTSESPSGTAPGSTSESPSGTAPGTSTPESGSASPGTSTPESGSASPGSEPATSGSETPGTSESATPESGPGSPAGSPTSTEEGTSTEPSEGSAPGTSESATPESGPGTSTEPSEGSAPGTSTEPSEGSAPGSPAGSPTSTEEGTSTEPSEGSAPGTSTEPSEGSAPGTSESATPESGPGTSESATPESGPGTSTEPSEGSAPGTSTEPSEGSAPGTSESATPESGPGTSTEPSEGSAPGSEPATSGSETPGSPAGSPTSTEEGSSTPSGATGSPGTPGSGTASSSPGSSTPSGATGSPGTSTEPSEGSAPGTSTEPSEGSAPGSEPATSGSETPGSPAGSPTSTEEGSPAGSPTSTEEGTSTEPSEGSAPGASASGAPSTGGTSESATPESGPGSPAGSPTSTEEGSPAGSPTSTEEGSTSSTAESPGPGSTSESPSGTAPGTSPSGESSTAPGTPGSGTASSSPGSSTPSGATGSPGSSPSASTGTGPGSEPATSGSETPGTSESATPESGPGSEPATSGSETPGSTSSTAESPGPGSTSSTAESPGPGTSPSGESSTAPGSEPATSGSETPGSEPATSGSETPGTSTEPSEGSAPGSTSSTAESPGPGTSTPESGSASPGSTSESPSGTAPGTSTEPSEGSAPGTSTEPSEGSAPGTSTEPSEGSAPGSSTPSGATGSPGSSPSASTGTGPGASPGTSSTGSPGSEPATSGSETPGTSESATPESGPGSPAGSPTSTEEGSSTPSGATGSPGSSPSASTGTGPGASPGTSSTGSPGTSESATPESGPGTSTEPSEGSAPGTSTEPSEGSAP

SEQ ID NO: 2224 - protein, 951 aa, Artificial Sequence
  Description of Artificial Sequence: Synthetic polypeptide
GLSKGCFGLKLDRIGSMSGLGCGYRQSMNNFQGLRSFGCRFGTCTVQKLAHQIYQFTDKDKDNVAPRSKISPQGYGGTSTEPSEGSAPGSEPATSGSETPGSPAGSPTSTEEGSTSSTAESPGPGTSTPESGSASPGSTSESPSGTAPGSTSESPSGTAPGTSTPESGSASPGTSTPESGSASPGSEPATSGSETPGTSESATPESGPGSPAGSPTSTEEGTSTEPSEGSAPGTSESATPESGPGTSTEPSEGSAPGTSTEPSEGSAPGSPAGSPTSTEEGTSTEPSEGSAPGTSTEPSEGSAPGTSESATPESGPGTSESATPESGPGTSTEPSEGSAPGTSTEPSEGSAPGTSESATPESGPGTSTEPSEGSAPGSEPATSGSETPGSPAGSPTSTEEGSSTPSGATGSPGTPGSGTASSSPGSSTPSGATGSPGTSTEPSEGSAPGTSTEPSEGSAPGSEPATSGSETPGSPAGSPTSTEEGSPAGSPTSTEEGTSTEPSEGSAPGASASGAPSTGGTSESATPESGPGSPAGSPTSTEEGSPAGSPTSTEEGSTSSTAESPGPGSTSESPSGTAPGTSPSGESSTAPGTPGSGTASSSPGSSTPSGATGSPGSSPSASTGTGPGSEPATSGSETPGTSESATPESGPGSEPATSGSETPGSTSSTAESPGPGSTSSTAESPGPGTSPSGESSTAPGSEPATSGSETPGSEPATSGSETPGTSTEPSEGSAPGSTSSTAESPGPGTSTPESGSASPGSTSESPSGTAPGTSTEPSEGSAPGTSTEPSEGSAPGTSTEPSEGSAPGSSTPSGATGSPGSSPSASTGTGPGASPGTSSTGSPGSEPATSGSETPGTSESATPESGPGSPAGSPTSTEEGSSTPSGATGSPGSSPSASTGTGPGASPGTSSTGSPGTSESATPESGPGTSTEPSEGSAPGTSTEPSEGSAP

SEQ ID NO: 2225 - protein, 961 aa, Artificial Sequence
  Description of Artificial Sequence: Synthetic polypeptide
TAPRSLRRSSCFGGRMDRIGAQSGLGCNSFRYGYRQSMNNFQGLRSFGCRFGTCTVQKLAHQIYQFTDKDKDNVAPRSKISPQGYGGTSTEPSEGSAPGSEPATSGSETPGSPAGSPTSTEEGSTSSTAESPGPGTSTPESGSASPGSTSESPSGTAPGSTSESPSGTAPGTSTPESGSASPGTSTPESGSASPGSEPATSGSETPGTSESATPESGPGSPAGSPTSTEEGTSTEPSEGSAPGTSESATPESGPGTSTEPSEGSAPGTSTEPSEGSAPGSPAGSPTSTEEGTSTEPSEGSAPGTSTEPSEGSAPGTSESATPESGPGTSESATPESGPGTSTEPSEGSAPGTSTEPSEGSAPGTSESATPESGPGTSTEPSEGSAPGSEPATSGSETPGSPAGSPTSTEEGSSTPSGATGSPGTPGSGTASSSPGSSTPSGATGSPGTSTEPSEGSAPGTSTEPSEGSAPGSEPATSGSETPGSPAGSPTSTEEGSPAGSPTSTEEGTSTEPSEGSAPGASASGAPSTGGTSESATPESGPGSPAGSPTSTEEGSPAGSPTSTEEGSTSSTAESPGPGSTSESPSGTAPGTSPSGESSTAPGTPGSGTASSSPGSSTPSGATGSPGSSPSASTGTGPGSEPATSGSETPGTSESATPESGPGSEPATSGSETPGSTSSTAESPGPGSTSSTAESPGPGTSPSGESSTAPGSEPATSGSETPGSEPATSGSETPGTSTEPSEGSAPGSTSSTAESPGPGTSTPESGSASPGSTSESPSGTAPGTSTEPSEGSAPGTSTEPSEGSAPGTSTEPSEGSAPGSSTPSGATGSPGSSPSASTGTGPGASPGTSSTGSPGSEPATSGSETPGTSESATPESGPGSPAGSPTSTEEGSSTPSGATGSPGSSPSASTGTGPGASPGTSSTGSPGTSESATPESGPGTSTEPSEGSAPGTSTEPSEGSAP

SEQ ID NO: 2226 - protein, 970 aa, Artificial Sequence
  Description of Artificial Sequence: Synthetic polypeptide
IVLSLDVPIGLLQILLEQARARAAREQATTNARILARVGHCGYRQSMNNFQGLRSFGCRFGTCTVQKLAHQIYQFTDKDKDNVAPRSKISPQGYGGTSTEPSEGSAPGSEPATSGSETPGSPAGSPTSTEEGSTSSTAESPGPGTSTPESGSASPGSTSESPSGTAPGSTSESPSGTAPGTSTPESGSASPGTSTPESGSASPGSEPATSGSETPGTSESATPESGPGSPAGSPTSTEEGTSTEPSEGSAPGTSESATPESGPGTSTEPSEGSAPGTSTEPSEGSAPGSPAGSPTSTEEGTSTEPSEGSAPGTSTEPSEGSAPGTSESATPESGPGTSESATPESGPGTSTEPSEGSAPGTSTEPSEGSAPGTSESATPESGPGTSTEPSEGSAPGSEPATSGSETPGSPAGSPTSTEEGSSTPSGATGSPGTPGSGTASSSPGSSTPSGATGSPGTSTEPSEGSAPGTSTEPSEGSAPGSEPATSGSETPGSPAGSPTSTEEGSPAGSPTSTEEGTSTEPSEGSAPGASASGAPSTGGTSESATPESGPGSPAGSPTSTEEGSPAGSPTSTEEGSTSSTAESPGPGSTSESPSGTAPGTSPSGESSTAPGTPGSGTASSSPGSSTPSGATGSPGSSPSASTGTGPGSEPATSGSETPGTSESATPESGPGSEPATSGSETPGSTSSTAESPGPGSTSSTAESPGPGTSPSGESSTAPGSEPATSGSETPGSEPATSGSETPGTSTEPSEGSAPGSTSSTAESPGPGTSTPESGSASPGSTSESPSGTAPGTSTEPSEGSAPGTSTEPSEGSAPGTSTEPSEGSAPGSSTPSGATGSPGSSPSASTGTGPGASPGTSSTGSPGSEPATSGSETPGTSESATPESGPGSPAGSPTSTEEGSSTPSGATGSPGSSPSASTGTGPGASPGTSSTGSPGTSESATPESGPGTSTEPSEGSAPGTSTEPSEGSAP

SEQ ID NO: 2227 - protein, 967 aa, Artificial Sequence
  Description of Artificial Sequence: Synthetic polypeptide
FTLSLDVPTNIMNLLFNIAKAKNLRAQAAANAHLMAQIGYRQSMNNFQGLRSFGCRFGTCTVQKLAHQIYQFTDKDKDNVAPRSKISPQGYGGTSTEPSEGSAPGSEPATSGSETPGSPAGSPTSTEEGSTSSTAESPGPGTSTPESGSASPGSTSESPSGTAPGSTSESPSGTAPGTSTPESGSASPGTSTPESGSASPGSEPATSGSETPGTSESATPESGPGSPAGSPTSTEEGTSTEPSEGSAPGTSESATPESGPGTSTEPSEGSAPGTSTEPSEGSAPGSPAGSPTSTEEGTSTEPSEGSAPGTSTEPSEGSAPGTSESATPESGPGTSESATPESGPGTSTEPSEGSAPGTSTEPSEGSAPGTSESATPESGPGTSTEPSEGSAPGSEPATSGSETPGSPAGSPTSTEEGSSTPSGATGSPGTPGSGTASSSPGSSTPSGATGSPGTSTEPSEGSAPGTSTEPSEGSAPGSEPATSGSETPGSPAGSPTSTEEGSPAGSPTSTEEGTSTEPSEGSAPGASASGAPSTGGTSESATPESGPGSPAGSPTSTEEGSPAGSPTSTEEGSTSSTAESPGPGSTSESPSGTAPGTSPSGESSTAPGTPGSGTASSSPGSSTPSGATGSPGSSPSASTGTGPGSEPATSGSETPGTSESATPESGPGSEPATSGSETPGSTSSTAESPGPGSTSSTAESPGPGTSPSGESSTAPGSEPATSGSETPGSEPATSGSETPGTSTEPSEGSAPGSTSSTAESPGPGTSTPESGSASPGSTSESPSGTAPGTSTEPSEGSAPGTSTEPSEGSAPGTSTEPSEGSAPGSSTPSGATGSPGSSPSASTGTGPGASPGTSSTGSPGSEPATSGSETPGTSESATPESGPGSPAGSPTSTEEGSSTPSGATGSPGSSPSASTGTGPGASPGTSSTGSPGTSESATPESGPGTSTEPSEGSAPGTSTEPSEGSAP

SEQ ID NO: 2228 - protein, 937 aa, Artificial Sequence
  Description of Artificial Sequence: Synthetic polypeptide
SLRRSSCFGGRMDRIGAQSGLGCNSFRYGTAPRSLRRSSCFGGRMDRIGAQSGLGCNSFRYGGTSTEPSEGSAPGSEPATSGSETPGSPAGSPTSTEEGSTSSTAESPGPGTSTPESGSASPGSTSESPSGTAPGSTSESPSGTAPGTSTPESGSASPGTSTPESGSASPGSEPATSGSETPGTSESATPESGPGSPAGSPTSTEEGTSTEPSEGSAPGTSESATPESGPGTSTEPSEGSAPGTSTEPSEGSAPGSPAGSPTSTEEGTSTEPSEGSAPGTSTEPSEGSAPGTSESATPESGPGTSESATPESGPGTSTEPSEGSAPGTSTEPSEGSAPGTSESATPESGPGTSTEPSEGSAPGSEPATSGSETPGSPAGSPTSTEEGSSTPSGATGSPGTPGSGTASSSPGSSTPSGATGSPGTSTEPSEGSAPGTSTEPSEGSAPGSEPATSGSETPGSPAGSPTSTEEGSPAGSPTSTEEGTSTEPSEGSAPGASASGAPSTGGTSESATPESGPGSPAGSPTSTEEGSPAGSPTSTEEGSTSSTAESPGPGSTSESPSGTAPGTSPSGESSTAPGTPGSGTASSSPGSSTPSGATGSPGSSPSASTGTGPGSEPATSGSETPGTSESATPESGPGSEPATSGSETPGSTSSTAESPGPGSTSSTAESPGPGTSPSGESSTAPGSEPATSGSETPGSEPATSGSETPGTSTEPSEGSAPGSTSSTAESPGPGTSTPESGSASPGSTSESPSGTAPGTSTEPSEGSAPGTSTEPSEGSAPGTSTEPSEGSAPGSSTPSGATGSPGSSPSASTGTGPGASPGTSSTGSPGSEPATSGSETPGTSESATPESGPGSPAGSPTSTEEGSSTPSGATGSPGSSPSASTGTGPGASPGTSSTGSPGTSESATPESGPGTSTEPSEGSAPGTSTEPSEGSAP

SEQ ID NO: 2229 - protein, 946 aa, Artificial Sequence
  Description of Artificial Sequence: Synthetic polypeptide
SLRRSSCFGGRMDRIGAQSGLGCNSFRYGIVLSLDVPIGLLQILLEQARARAAREQATTNARILARVGHCGGTSTEPSEGSAPGSEPATSGSETPGSPAGSPTSTEEGSTSSTAESPGPGTSTPESGSASPGSTSESPSGTAPGSTSESPSGTAPGTSTPESGSASPGTSTPESGSASPGSEPATSGSETPGTSESATPESGPGSPAGSPTSTEEGTSTEPSEGSAPGTSESATPESGPGTSTEPSEGSAPGTSTEPSEGSAPGSPAGSPTSTEEGTSTEPSEGSAPGTSTEPSEGSAPGTSESATPESGPGTSESATPESGPGTSTEPSEGSAPGTSTEPSEGSAPGTSESATPESGPGTSTEPSEGSAPGSEPATSGSETPGSPAGSPTSTEEGSSTPSGATGSPGTPGSGTASSSPGSSTPSGATGSPGTSTEPSEGSAPGTSTEPSEGSAPGSEPATSGSETPGSPAGSPTSTEEGSPAGSPTSTEEGTSTEPSEGSAPGASASGAPSTGGTSESATPESGPGSPAGSPTSTEEGSPAGSPTSTEEGSTSSTAESPGPGSTSESPSGTAPGTSPSGESSTAPGTPGSGTASSSPGSSTPSGATGSPGSSPSASTGTGPGSEPATSGSETPGTSESATPESGPGSEPATSGSETPGSTSSTAESPGPGSTSSTAESPGPGTSPSGESSTAPGSEPATSGSETPGSEPATSGSETPGTSTEPSEGSAPGSTSSTAESPGPGTSTPESGSASPGSTSESPSGTAPGTSTEPSEGSAPGTSTEPSEGSAPGTSTEPSEGSAPGSSTPSGATGSPGSSPSASTGTGPGASPGTSSTGSPGSEPATSGSETPGTSESATPESGPGSPAGSPTSTEEGSSTPSGATGSPGSSPSASTGTGPGASPGTSSTGSPGTSESATPESGPGTSTEPSEGSAPGTSTEPSEGSAP

SEQ ID NO: 2230 - protein, 943 aa, Artificial Sequence
  Description of Artificial Sequence: Synthetic polypeptide
SLRRSSCFGGRMDRIGAQSGLGCNSFRYGFTLSLDVPTNIMNLLFNIAKAKNLRAQAAANAHLMAQIGGTSTEPSEGSAPGSEPATSGSETPGSPAGSPTSTEEGSTSSTAESPGPGTSTPESGSASPGSTSESPSGTAPGSTSESPSGTAPGTSTPESGSASPGTSTPESGSASPGSEPATSGSETPGTSESATPESGPGSPAGSPTSTEEGTSTEPSEGSAPGTSESATPESGPGTSTEPSEGSAPGTSTEPSEGSAPGSPAGSPTSTEEGTSTEPSEGSAPGTSTEPSEGSAPGTSESATPESGPGTSESATPESGPGTSTEPSEGSAPGTSTEPSEGSAPGTSESATPESGPGTSTEPSEGSAPGSEPATSGSETPGSPAGSPTSTEEGSSTPSGATGSPGTPGSGTASSSPGSSTPSGATGSPGTSTEPSEGSAPGTSTEPSEGSAPGSEPATSGSETPGSPAGSPTSTEEGSPAGSPTSTEEGTSTEPSEGSAPGASASGAPSTGGTSESATPESGPGSPAGSPTSTEEGSPAGSPTSTEEGSTSSTAESPGPGSTSESPSGTAPGTSPSGESSTAPGTPGSGTASSSPGSSTPSGATGSPGSSPSASTGTGPGSEPATSGSETPGTSESATPESGPGSEPATSGSETPGSTSSTAESPGPGSTSSTAESPGPGTSPSGESSTAPGSEPATSGSETPGSEPATSGSETPGTSTEPSEGSAPGSTSSTAESPGPGTSTPESGSASPGSTSESPSGTAPGTSTEPSEGSAPGTSTEPSEGSAPGTSTEPSEGSAPGSSTPSGATGSPGSSPSASTGTGPGASPGTSSTGSPGSEPATSGSETPGTSESATPESGPGSPAGSPTSTEEGSSTPSGATGSPGSSPSASTGTGPGASPGTSSTGSPGTSESATPESGPGTSTEPSEGSAPGTSTEPSEGSAP

SEQ ID NO: 2231 - protein, 937 aa, Artificial Sequence
  Description of Artificial Sequence: Synthetic polypeptide
TAPRSLRRSSCFGGRMDRIGAQSGLGCNSFRYGSLRRSSCFGGRMDRIGAQSGLGCNSFRYGGTSTEPSEGSAPGSEPATSGSETPGSPAGSPTSTEEGSTSSTAESPGPGTSTPESGSASPGSTSESPSGTAPGSTSESPSGTAPGTSTPESGSASPGTSTPESGSASPGSEPATSGSETPGTSESATPESGPGSPAGSPTSTEEGTSTEPSEGSAPGTSESATPESGPGTSTEPSEGSAPGTSTEPSEGSAPGSPAGSPTSTEEGTSTEPSEGSAPGTSTEPSEGSAPGTSESATPESGPGTSESATPESGPGTSTEPSEGSAPGTSTEPSEGSAPGTSESATPESGPGTSTEPSEGSAPGSEPATSGSETPGSPAGSPTSTEEGSSTPSGATGSPGTPGSGTASSSPGSSTPSGATGSPGTSTEPSEGSAPGTSTEPSEGSAPGSEPATSGSETPGSPAGSPTSTEEGSPAGSPTSTEEGTSTEPSEGSAPGASASGAPSTGGTSESATPESGPGSPAGSPTSTEEGSPAGSPTSTEEGSTSSTAESPGPGSTSESPSGTAPGTSPSGESSTAPGTPGSGTASSSPGSSTPSGATGSPGSSPSASTGTGPGSEPATSGSETPGTSESATPESGPGSEPATSGSETPGSTSSTAESPGPGSTSSTAESPGPGTSPSGESSTAPGSEPATSGSETPGSEPATSGSETPGTSTEPSEGSAPGSTSSTAESPGPGTSTPESGSASPGSTSESPSGTAPGTSTEPSEGSAPGTSTEPSEGSAPGTSTEPSEGSAPGSSTPSGATGSPGSSPSASTGTGPGASPGTSSTGSPGSEPATSGSETPGTSESATPESGPGSPAGSPTSTEEGSSTPSGATGSPGSSPSASTGTGPGASPGTSSTGSPGTSESATPESGPGTSTEPSEGSAPGTSTEPSEGSAP

SEQ ID NO: 2232 - protein, 946 aa, Artificial Sequence
  Description of Artificial Sequence: Synthetic polypeptide
IVLSLDVPIGLLQILLEQARARAAREQATTNARILARVGHCGSLRRSSCFGGRMDRIGAQSGLGCNSFRYGGTSTEPSEGSAPGSEPATSGSETPGSPAGSPTSTEEGSTSSTAESPGPGTSTPESGSASPGSTSESPSGTAPGSTSESPSGTAPGTSTPESGSASPGTSTPESGSASPGSEPATSGSETPGTSESATPESGPGSPAGSPTSTEEGTSTEPSEGSAPGTSESATPESGPGTSTEPSEGSAPGTSTEPSEGSAPGSPAGSPTSTEEGTSTEPSEGSAPGTSTEPSEGSAPGTSESATPESGPGTSESATPESGPGTSTEPSEGSAPGTSTEPSEGSAPGTSESATPESGPGTSTEPSEGSAPGSEPATSGSETPGSPAGSPTSTEEGSSTPSGATGSPGTPGSGTASSSPGSSTPSGATGSPGTSTEPSEGSAPGTSTEPSEGSAPGSEPATSGSETPGSPAGSPTSTEEGSPAGSPTSTEEGTSTEPSEGSAPGASASGAPSTGGTSESATPESGPGSPAGSPTSTEEGSPAGSPTSTEEGSTSSTAESPGPGSTSESPSGTAPGTSPSGESSTAPGTPGSGTASSSPGSSTPSGATGSPGSSPSASTGTGPGSEPATSGSETPGTSESATPESGPGSEPATSGSETPGSTSSTAESPGPGSTSSTAESPGPGTSPSGESSTAPGSEPATSGSETPGSEPATSGSETPGTSTEPSEGSAPGSTSSTAESPGPGTSTPESGSASPGSTSESPSGTAPGTSTEPSEGSAPGTSTEPSEGSAPGTSTEPSEGSAPGSSTPSGATGSPGSSPSASTGTGPGASPGTSSTGSPGSEPATSGSETPGTSESATPESGPGSPAGSPTSTEEGSSTPSGATGSPGSSPSASTGTGPGASPGTSSTGSPGTSESATPESGPGTSTEPSEGSAPGTSTEPSEGSAP

SEQ ID NO: 2233 - protein, 943 aa, Artificial Sequence
  Description of Artificial Sequence: Synthetic polypeptide
FTLSLDVPTNIMNLLFNIAKAKNLRAQAAANAHLMAQIGSLRRSSCFGGRMDRIGAQSGLGCNSFRYGGTSTEPSEGSAPGSEPATSGSETPGSPAGSPTSTEEGSTSSTAESPGPGTSTPESGSASPGSTSESPSGTAPGSTSESPSGTAPGTSTPESGSASPGTSTPESGSASPGSEPATSGSETPGTSESATPESGPGSPAGSPTSTEEGTSTEPSEGSAPGTSESATPESGPGTSTEPSEGSAPGTSTEPSEGSAPGSPAGSPTSTEEGTSTEPSEGSAPGTSTEPSEGSAPGTSESATPESGPGTSESATPESGPGTSTEPSEGSAPGTSTEPSEGSAPGTSESATPESGPGTSTEPSEGSAPGSEPATSGSETPGSPAGSPTSTEEGSSTPSGATGSPGTPGSGTASSSPGSSTPSGATGSPGTSTEPSEGSAPGTSTEPSEGSAPGSEPATSGSETPGSPAGSPTSTEEGSPAGSPTSTEEGTSTEPSEGSAPGASASGAPSTGGTSESATPESGPGSPAGSPTSTEEGSPAGSPTSTEEGSTSSTAESPGPGSTSESPSGTAPGTSPSGESSTAPGTPGSGTASSSPGSSTPSGATGSPGSSPSASTGTGPGSEPATSGSETPGTSESATPESGPGSEPATSGSETPGSTSSTAESPGPGSTSSTAESPGPGTSPSGESSTAPGSEPATSGSETPGSEPATSGSETPGTSTEPSEGSAPGSTSSTAESPGPGTSTPESGSASPGSTSESPSGTAPGTSTEPSEGSAPGTSTEPSEGSAPGTSTEPSEGSAPGSSTPSGATGSPGSSPSASTGTGPGASPGTSSTGSPGSEPATSGSETPGTSESATPESGPGSPAGSPTSTEEGSSTPSGATGSPGSSPSASTGTGPGASPGTSSTGSPGTSESATPESGPGTSTEPSEGSAPGTSTEPSEGSAP

SEQ ID NO: 2234 - protein, 941 aa, Artificial Sequence
  Description of Artificial Sequence: Synthetic polypeptide
SPKMVQGSGGFGRKMDRISSSSGLGCKVLRRHGTAPRSLRRSSCFGGRMDRIGAQSGLGCNSFRYGGTSTEPSEGSAPGSEPATSGSETPGSPAGSPTSTEEGSTSSTAESPGPGTSTPESGSASPGSTSESPSGTAPGSTSESPSGTAPGTSTPESGSASPGTSTPESGSASPGSEPATSGSETPGTSESATPESGPGSPAGSPTSTEEGTSTEPSEGSAPGTSESATPESGPGTSTEPSEGSAPGTSTEPSEGSAPGSPAGSPTSTEEGTSTEPSEGSAPGTSTEPSEGSAPGTSESATPESGPGTSESATPESGPGTSTEPSEGSAPGTSTEPSEGSAPGTSESATPESGPGTSTEPSEGSAPGSEPATSGSETPGSPAGSPTSTEEGSSTPSGATGSPGTPGSGTASSSPGSSTPSGATGSPGTSTEPSEGSAPGTSTEPSEGSAPGSEPATSGSETPGSPAGSPTSTEEGSPAGSPTSTEEGTSTEPSEGSAPGASASGAPSTGGTSESATPESGPGSPAGSPTSTEEGSPAGSPTSTEEGSTSSTAESPGPGSTSESPSGTAPGTSPSGESSTAPGTPGSGTASSSPGSSTPSGATGSPGSSPSASTGTGPGSEPATSGSETPGTSESATPESGPGSEPATSGSETPGSTSSTAESPGPGSTSSTAESPGPGTSPSGESSTAPGSEPATSGSETPGSEPATSGSETPGTSTEPSEGSAPGSTSSTAESPGPGTSTPESGSASPGSTSESPSGTAPGTSTEPSEGSAPGTSTEPSEGSAPGTSTEPSEGSAPGSSTPSGATGSPGSSPSASTGTGPGASPGTSSTGSPGSEPATSGSETPGTSESATPESGPGSPAGSPTSTEEGSSTPSGATGSPGSSPSASTGTGPGASPGTSSTGSPGTSESATPESGPGTSTEPSEGSAPGTSTEPSEGSAP

SEQ ID NO: 2235 - protein, 950 aa, Artificial Sequence
  Description of Artificial Sequence: Synthetic polypeptide
SPKMVQGSGGFGRKMDRISSSSGLGCKVLRRHGIVLSLDVPIGLLQILLEQARARAAREQATTNARILARVGHCGGTSTEPSEGSAPGSEPATSGSETPGSPAGSPTSTEEGSTSSTAESPGPGTSTPESGSASPGSTSESPSGTAPGSTSESPSGTAPGTSTPESGSASPGTSTPESGSASPGSEPATSGSETPGTSESATPESGPGSPAGSPTSTEEGTSTEPSEGSAPGTSESATPESGPGTSTEPSEGSAPGTSTEPSEGSAPGSPAGSPTSTEEGTSTEPSEGSAPGTSTEPSEGSAPGTSESATPESGPGTSESATPESGPGTSTEPSEGSAPGTSTEPSEGSAPGTSESATPESGPGTSTEPSEGSAPGSEPATSGSETPGSPAGSPTSTEEGSSTPSGATGSPGTPGSGTASSSPGSSTPSGATGSPGTSTEPSEGSAPGTSTEPSEGSAPGSEPATSGSETPGSPAGSPTSTEEGSPAGSPTSTEEGTSTEPSEGSAPGASASGAPSTGGTSESATPESGPGSPAGSPTSTEEGSPAGSPTSTEEGSTSSTAESPGPGSTSESPSGTAPGTSPSGESSTAPGTPGSGTASSSPGSSTPSGATGSPGSSPSASTGTGPGSEPATSGSETPGTSESATPESGPGSEPATSGSETPGSTSSTAESPGPGSTSSTAESPGPGTSPSGESSTAPGSEPATSGSETPGSEPATSGSETPGTSTEPSEGSAPGSTSSTAESPGPGTSTPESGSASPGSTSESPSGTAPGTSTEPSEGSAPGTSTEPSEGSAPGTSTEPSEGSAPGSSTPSGATGSPGSSPSASTGTGPGASPGTSSTGSPGSEPATSGSETPGTSESATPESGPGSPAGSPTSTEEGSSTPSGATGSPGSSPSASTGTGPGASPGTSSTGSPGTSESATPESGPGTSTEPSEGSAPGTSTEPSEGSAP

SEQ ID NO: 2236 - protein, 947 aa, Artificial Sequence
  Description of Artificial Sequence: Synthetic polypeptide
SPKMVQGSGGFGRKMDRISSSSGLGCKVLRRHGFTLSLDVPTNIMNLLFNIAKAKNLRAQAAANAHLMAQIGGTSTEPSEGSAPGSEPATSGSETPGSPAGSPTSTEEGSTSSTAESPGPGTSTPESGSASPGSTSESPSGTAPGSTSESPSGTAPGTSTPESGSASPGTSTPESGSASPGSEPATSGSETPGTSESATPESGPGSPAGSPTSTEEGTSTEPSEGSAPGTSESATPESGPGTSTEPSEGSAPGTSTEPSEGSAPGSPAGSPTSTEEGTSTEPSEGSAPGTSTEPSEGSAPGTSESATPESGPGTSESATPESGPGTSTEPSEGSAPGTSTEPSEGSAPGTSESATPESGPGTSTEPSEGSAPGSEPATSGSETPGSPAGSPTSTEEGSSTPSGATGSPGTPGSGTASSSPGSSTPSGATGSPGTSTEPSEGSAPGTSTEPSEGSAPGSEPATSGSETPGSPAGSPTSTEEGSPAGSPTSTEEGTSTEPSEGSAPGASASGAPSTGGTSESATPESGPGSPAGSPTSTEEGSPAGSPTSTEEGSTSSTAESPGPGSTSESPSGTAPGTSPSGESSTAPGTPGSGTASSSPGSSTPSGATGSPGSSPSASTGTGPGSEPATSGSETPGTSESATPESGPGSEPATSGSETPGSTSSTAESPGPGSTSSTAESPGPGTSPSGESSTAPGSEPATSGSETPGSEPATSGSETPGTSTEPSEGSAPGSTSSTAESPGPGTSTPESGSASPGSTSESPSGTAPGTSTEPSEGSAPGTSTEPSEGSAPGTSTEPSEGSAPGSSTPSGATGSPGSSPSASTGTGPGASPGTSSTGSPGSEPATSGSETPGTSESATPESGPGSPAGSPTSTEEGSSTPSGATGSPGSSPSASTGTGPGASPGTSSTGSPGTSESATPESGPGTSTEPSEGSAPGTSTEPSEGSAP

SEQ ID NO: 2237 - protein, 941 aa, Artificial Sequence
  Description of Artificial Sequence: Synthetic polypeptide
TAPRSLRRSSCFGGRMDRIGAQSGLGCNSFRYGSPKMVQGSGGFGRKMDRISSSSGLGCKVLRRHGGTSTEPSEGSAPGSEPATSGSETPGSPAGSPTSTEEGSTSSTAESPGPGTSTPESGSASPGSTSESPSGTAPGSTSESPSGTAPGTSTPESGSASPGTSTPESGSASPGSEPATSGSETPGTSESATPESGPGSPAGSPTSTEEGTSTEPSEGSAPGTSESATPESGPGTSTEPSEGSAPGTSTEPSEGSAPGSPAGSPTSTEEGTSTEPSEGSAPGTSTEPSEGSAPGTSESATPESGPGTSESATPESGPGTSTEPSEGSAPGTSTEPSEGSAPGTSESATPESGPGTSTEPSEGSAPGSEPATSGSETPGSPAGSPTSTEEGSSTPSGATGSPGTPGSGTASSSPGSSTPSGATGSPGTSTEPSEGSAPGTSTEPSEGSAPGSEPATSGSETPGSPAGSPTSTEEGSPAGSPTSTEEGTSTEPSEGSAPGASASGAPSTGGTSESATPESGPGSPAGSPTSTEEGSPAGSPTSTEEGSTSSTAESPGPGSTSESPSGTAPGTSPSGESSTAPGTPGSGTASSSPGSSTPSGATGSPGSSPSASTGTGPGSEPATSGSETPGTSESATPESGPGSEPATSGSETPGSTSSTAESPGPGSTSSTAESPGPGTSPSGESSTAPGSEPATSGSETPGSEPATSGSETPGTSTEPSEGSAPGSTSSTAESPGPGTSTPESGSASPGSTSESPSGTAPGTSTEPSEGSAPGTSTEPSEGSAPGTSTEPSEGSAPGSSTPSGATGSPGSSPSASTGTGPGASPGTSSTGSPGSEPATSGSETPGTSESATPESGPGSPAGSPTSTEEGSSTPSGATGSPGSSPSASTGTGPGASPGTSSTGSPGTSESATPESGPGTSTEPSEGSAPGTSTEPSEGSAP

SEQ ID NO: 2238 - protein, 950 aa, Artificial Sequence
  Description of Artificial Sequence: Synthetic polypeptide
IVLSLDVPIGLLQILLEQARARAAREQATTNARILARVGHCGSPKMVQGSGGFGRKMDRISSSSGLGCKVLRRHGGTSTEPSEGSAPGSEPATSGSETPGSPAGSPTSTEEGSTSSTAESPGPGTSTPESGSASPGSTSESPSGTAPGSTSESPSGTAPGTSTPESGSASPGTSTPESGSASPGSEPATSGSETPGTSESATPESGPGSPAGSPTSTEEGTSTEPSEGSAPGTSESATPESGPGTSTEPSEGSAPGTSTEPSEGSAPGSPAGSPTSTEEGTSTEPSEGSAPGTSTEPSEGSAPGTSESATPESGPGTSESATPESGPGTSTEPSEGSAPGTSTEPSEGSAPGTSESATPESGPGTSTEPSEGSAPGSEPATSGSETPGSPAGSPTSTEEGSSTPSGATGSPGTPGSGTASSSPGSSTPSGATGSPGTSTEPSEGSAPGTSTEPSEGSAPGSEPATSGSETPGSPAGSPTSTEEGSPAGSPTSTEEGTSTEPSEGSAPGASASGAPSTGGTSESATPESGPGSPAGSPTSTEEGSPAGSPTSTEEGSTSSTAESPGPGSTSESPSGTAPGTSPSGESSTAPGTPGSGTASSSPGSSTPSGATGSPGSSPSASTGTGPGSEPATSGSETPGTSESATPESGPGSEPATSGSETPGSTSSTAESPGPGSTSSTAESPGPGTSPSGESSTAPGSEPATSGSETPGSEPATSGSETPGTSTEPSEGSAPGSTSSTAESPGPGTSTPESGSASPGSTSESPSGTAPGTSTEPSEGSAPGTSTEPSEGSAPGTSTEPSEGSAPGSSTPSGATGSPGSSPSASTGTGPGASPGTSSTGSPGSEPATSGSETPGTSESATPESGPGSPAGSPTSTEEGSSTPSGATGSPGSSPSASTGTGPGASPGTSSTGSPGTSESATPESGPGTSTEPSEGSAPGTSTEPSEGSAP

SEQ ID NO: 2239 - protein, 947 aa, Artificial Sequence
  Description of Artificial Sequence: Synthetic polypeptide
FTLSLDVPTNIMNLLFNIAKAKNLRAQAAANAHLMAQIGSPKMVQGSGGFGRKMDRISSSSGLGCKVLRRHGGTSTEPSEGSAPGSEPATSGSETPGSPAGSPTSTEEGSTSSTAESPGPGTSTPESGSASPGSTSESPSGTAPGSTSESPSGTAPGTSTPESGSASPGTSTPESGSASPGSEPATSGSETPGTSESATPESGPGSPAGSPTSTEEGTSTEPSEGSAPGTSESATPESGPGTSTEPSEGSAPGTSTEPSEGSAPGSPAGSPTSTEEGTSTEPSEGSAPGTSTEPSEGSAPGTSESATPESGPGTSESATPESGPGTSTEPSEGSAPGTSTEPSEGSAPGTSESATPESGPGTSTEPSEGSAPGSEPATSGSETPGSPAGSPTSTEEGSSTPSGATGSPGTPGSGTASSSPGSSTPSGATGSPGTSTEPSEGSAPGTSTEPSEGSAPGSEPATSGSETPGSPAGSPTSTEEGSPAGSPTSTEEGTSTEPSEGSAPGASASGAPSTGGTSESATPESGPGSPAGSPTSTEEGSPAGSPTSTEEGSTSSTAESPGPGSTSESPSGTAPGTSPSGESSTAPGTPGSGTASSSPGSSTPSGATGSPGSSPSASTGTGPGSEPATSGSETPGTSESATPESGPGSEPATSGSETPGSTSSTAESPGPGSTSSTAESPGPGTSPSGESSTAPGSEPATSGSETPGSEPATSGSETPGTSTEPSEGSAPGSTSSTAESPGPGTSTPESGSASPGSTSESPSGTAPGTSTEPSEGSAPGTSTEPSEGSAPGTSTEPSEGSAPGSSTPSGATGSPGSSPSASTGTGPGASPGTSSTGSPGSEPATSGSETPGTSESATPESGPGSPAGSPTSTEEGSSTPSGATGSPGSSPSASTGTGPGASPGTSSTGSPGTSESATPESGPGTSTEPSEGSAPGTSTEPSEGSAP

SEQ ID NO: 2240 - protein, 950 aa, Artificial Sequence
  Description of Artificial Sequence: Synthetic polypeptide
TAPRSLRRSSCFGGRMDRIGAQSGLGCNSFRYGIVLSLDVPIGLLQILLEQARARAAREQATTNARILARVGHCGGTSTEPSEGSAPGSEPATSGSETPGSPAGSPTSTEEGSTSSTAESPGPGTSTPESGSASPGSTSESPSGTAPGSTSESPSGTAPGTSTPESGSASPGTSTPESGSASPGSEPATSGSETPGTSESATPESGPGSPAGSPTSTEEGTSTEPSEGSAPGTSESATPESGPGTSTEPSEGSAPGTSTEPSEGSAPGSPAGSPTSTEEGTSTEPSEGSAPGTSTEPSEGSAPGTSESATPESGPGTSESATPESGPGTSTEPSEGSAPGTSTEPSEGSAPGTSESATPESGPGTSTEPSEGSAPGSEPATSGSETPGSPAGSPTSTEEGSSTPSGATGSPGTPGSGTASSSPGSSTPSGATGSPGTSTEPSEGSAPGTSTEPSEGSAPGSEPATSGSETPGSPAGSPTSTEEGSPAGSPTSTEEGTSTEPSEGSAPGASASGAPSTGGTSESATPESGPGSPAGSPTSTEEGSPAGSPTSTEEGSTSSTAESPGPGSTSESPSGTAPGTSPSGESSTAPGTPGSGTASSSPGSSTPSGATGSPGSSPSASTGTGPGSEPATSGSETPGTSESATPESGPGSEPATSGSETPGSTSSTAESPGPGSTSSTAESPGPGTSPSGESSTAPGSEPATSGSETPGSEPATSGSETPGTSTEPSEGSAPGSTSSTAESPGPGTSTPESGSASPGSTSESPSGTAPGTSTEPSEGSAPGTSTEPSEGSAPGTSTEPSEGSAPGSSTPSGATGSPGSSPSASTGTGPGASPGTSSTGSPGSEPATSGSETPGTSESATPESGPGSPAGSPTSTEEGSSTPSGATGSPGSSPSASTGTGPGASPGTSSTGSPGTSESATPESGPGTSTEPSEGSAPGTSTEPSEGSAP

SEQ ID NO: 2241 - protein, 947 aa, Artificial Sequence
  Description of Artificial Sequence: Synthetic polypeptide
TAPRSLRRSSCFGGRMDRIGAQSGLGCNSFRYGFTLSLDVPTNIMNLLFNIAKAKNLRAQAAANAHLMAQIGGTSTEPSEGSAPGSEPATSGSETPGSPAGSPTSTEEGSTSSTAESPGPGTSTPESGSASPGSTSESPSGTAPGSTSESPSGTAPGTSTPESGSASPGTSTPESGSASPGSEPATSGSETPGTSESATPESGPGSPAGSPTSTEEGTSTEPSEGSAPGTSESATPESGPGTSTEPSEGSAPGTSTEPSEGSAPGSPAGSPTSTEEGTSTEPSEGSAPGTSTEPSEGSAPGTSESATPESGPGTSESATPESGPGTSTEPSEGSAPGTSTEPSEGSAPGTSESATPESGPGTSTEPSEGSAPGSEPATSGSETPGSPAGSPTSTEEGSSTPSGATGSPGTPGSGTASSSPGSSTPSGATGSPGTSTEPSEGSAPGTSTEPSEGSAPGSEPATSGSETPGSPAGSPTSTEEGSPAGSPTSTEEGTSTEPSEGSAPGASASGAPSTGGTSESATPESGPGSPAGSPTSTEEGSPAGSPTSTEEGSTSSTAESPGPGSTSESPSGTAPGTSPSGESSTAPGTPGSGTASSSPGSSTPSGATGSPGSSPSASTGTGPGSEPATSGSETPGTSESATPESGPGSEPATSGSETPGSTSSTAESPGPGSTSSTAESPGPGTSPSGESSTAPGSEPATSGSETPGSEPATSGSETPGTSTEPSEGSAPGSTSSTAESPGPGTSTPESGSASPGSTSESPSGTAPGTSTEPSEGSAPGTSTEPSEGSAPGTSTEPSEGSAPGSSTPSGATGSPGSSPSASTGTGPGASPGTSSTGSPGSEPATSGSETPGTSESATPESGPGSPAGSPTSTEEGSSTPSGATGSPGSSPSASTGTGPGASPGTSSTGSPGTSESATPESGPGTSTEPSEGSAPGTSTEPSEGSAP

SEQ ID NO: 2242 - protein, 950 aa, Artificial Sequence
  Description of Artificial Sequence: Synthetic polypeptide
IVLSLDVPIGLLQILLEQARARAAREQATTNARILARVGHCGTAPRSLRRSSCFGGRMDRIGAQSGLGCNSFRYGGTSTEPSEGSAPGSEPATSGSETPGSPAGSPTSTEEGSTSSTAESPGPGTSTPESGSASPGSTSESPSGTAPGSTSESPSGTAPGTSTPESGSASPGTSTPESGSASPGSEPATSGSETPGTSESATPESGPGSPAGSPTSTEEGTSTEPSEGSAPGTSESATPESGPGTSTEPSEGSAPGTSTEPSEGSAPGSPAGSPTSTEEGTSTEPSEGSAPGTSTEPSEGSAPGTSESATPESGPGTSESATPESGPGTSTEPSEGSAPGTSTEPSEGSAPGTSESATPESGPGTSTEPSEGSAPGSEPATSGSETPGSPAGSPTSTEEGSSTPSGATGSPGTPGSGTASSSPGSSTPSGATGSPGTSTEPSEGSAPGTSTEPSEGSAPGSEPATSGSETPGSPAGSPTSTEEGSPAGSPTSTEEGTSTEPSEGSAPGASASGAPSTGGTSESATPESGPGSPAGSPTSTEEGSPAGSPTSTEEGSTSSTAESPGPGSTSESPSGTAPGTSPSGESSTAPGTPGSGTASSSPGSSTPSGATGSPGSSPSASTGTGPGSEPATSGSETPGTSESATPESGPGSEPATSGSETPGSTSSTAESPGPGSTSSTAESPGPGTSPSGESSTAPGSEPATSGSETPGSEPATSGSETPGTSTEPSEGSAPGSTSSTAESPGPGTSTPESGSASPGSTSESPSGTAPGTSTEPSEGSAPGTSTEPSEGSAPGTSTEPSEGSAPGSSTPSGATGSPGSSPSASTGTGPGASPGTSSTGSPGSEPATSGSETPGTSESATPESGPGSPAGSPTSTEEGSSTPSGATGSPGSSPSASTGTGPGASPGTSSTGSPGTSESATPESGPGTSTEPSEGSAPGTSTEPSEGSAP

SEQ ID NO: 2243 - protein, 947 aa, Artificial Sequence
  Description of Artificial Sequence: Synthetic polypeptide
FTLSLDVPTNIMNLLFNIAKAKNLRAQAAANAHLMAQIGTAPRSLRRSSCFGGRMDRIGAQSGLGCNSFRYGGTSTEPSEGSAPGSEPATSGSETPGSPAGSPTSTEEGSTSSTAESPGPGTSTPESGSASPGSTSESPSGTAPGSTSESPSGTAPGTSTPESGSASPGTSTPESGSASPGSEPATSGSETPGTSESATPESGPGSPAGSPTSTEEGTSTEPSEGSAPGTSESATPESGPGTSTEPSEGSAPGTSTEPSEGSAPGSPAGSPTSTEEGTSTEPSEGSAPGTSTEPSEGSAPGTSESATPESGPGTSESATPESGPGTSTEPSEGSAPGTSTEPSEGSAPGTSESATPESGPGTSTEPSEGSAPGSEPATSGSETPGSPAGSPTSTEEGSSTPSGATGSPGTPGSGTASSSPGSSTPSGATGSPGTSTEPSEGSAPGTSTEPSEGSAPGSEPATSGSETPGSPAGSPTSTEEGSPAGSPTSTEEGTSTEPSEGSAPGASASGAPSTGGTSESATPESGPGSPAGSPTSTEEGSPAGSPTSTEEGSTSSTAESPGPGSTSESPSGTAPGTSPSGESSTAPGTPGSGTASSSPGSSTPSGATGSPGSSPSASTGTGPGSEPATSGSETPGTSESATPESGPGSEPATSGSETPGSTSSTAESPGPGSTSSTAESPGPGTSPSGESSTAPGSEPATSGSETPGSEPATSGSETPGTSTEPSEGSAPGSTSSTAESPGPGTSTPESGSASPGSTSESPSGTAPGTSTEPSEGSAPGTSTEPSEGSAPGTSTEPSEGSAPGSSTPSGATGSPGSSPSASTGTGPGASPGTSSTGSPGSEPATSGSETPGTSESATPESGPGSPAGSPTSTEEGSSTPSGATGSPGSSPSASTGTGPGASPGTSSTGSPGTSESATPESGPGTSTEPSEGSAPGTSTEPSEGSAP

SEQ ID NO: 2244 - protein, 1534 aa, Artificial Sequence
  Description of Artificial Sequence: Synthetic polypeptide
YRQSMNNFQGLRSFGCRFGTCTVQKLAHQIYQFTDKDKDNVAPRSKISPQGYGGSPAGSPTSTEEGTSESATPESGPGTSTEPSEGSAPGSPAGSPTSTEEGTSTEPSEGSAPGTSTEPSEGSAPGTSESATPESGPGSEPATSGSETPGSEPATSGSETPGSPAGSPTSTEEGTSESATPESGPGTSTEPSEGSAPGTSTEPSEGSAPGSPAGSPTSTEEGTSTEPSEGSAPGTSTEPSEGSAPGTSESATPESGPGTSTEPSEGSAPGTSESATPESGPGSEPATSGSETPGTSTEPSEGSAPGTSTEPSEGSAPGTSESATPESGPGTSESATPESGPGSPAGSPTSTEEGTSESATPESGPGSEPATSGSETPGTSESATPESGPGTSTEPSEGSAPGTSTEPSEGSAPGTSTEPSEGSAPGTSTEPSEGSAPGTSTEPSEGSAPGTSTEPSEGSAPGSPAGSPTSTEEGTSTEPSEGSAPGTSESATPESGPGSEPATSGSETPGTSESATPESGPGSEPATSGSETPGTSESATPESGPGTSTEPSEGSAPGTSESATPESGPGSPAGSPTSTEEGSPAGSPTSTEEGSPAGSPTSTEEGTSESATPESGPGTSTEPSEGSAPGSLRRSSCFGGRMDRIGAQSGLGCNSFRYGGTSTEPSEGSAPGSEPATSGSETPGSPAGSPTSTEEGSTSSTAESPGPGTSTPESGSASPGSTSESPSGTAPGSTSESPSGTAPGTSTPESGSASPGTSTPESGSASPGSEPATSGSETPGTSESATPESGPGSPAGSPTSTEEGTSTEPSEGSAPGTSESATPESGPGTSTEPSEGSAPGTSTEPSEGSAPGSPAGSPTSTEEGTSTEPSEGSAPGTSTEPSEGSAPGTSESATPESGPGTSESATPESGPGTSTEPSEGSAPGTSTEPSEGSAPGTSESATPESGPGTSTEPSEGSAPGSEPATSGSETPGSPAGSPTSTEEGSSTPSGATGSPGTPGSGTASSSPGSSTPSGATGSPGTSTEPSEGSAPGTSTEPSEGSAPGSEPATSGSETPGSPAGSPTSTEEGSPAGSPTSTEEGTSTEPSEGSAPGASASGAPSTGGTSESATPESGPGSPAGSPTSTEEGSPAGSPTSTEEGSTSSTAESPGPGSTSESPSGTAPGTSPSGESSTAPGTPGSGTASSSPGSSTPSGATGSPGSSPSASTGTGPGSEPATSGSETPGTSESATPESGPGSEPATSGSETPGSTSSTAESPGPGSTSSTAESPGPGTSPSGESSTAPGSEPATSGSETPGSEPATSGSETPGTSTEPSEGSAPGSTSSTAESPGPGTSTPESGSASPGSTSESPSGTAPGTSTEPSEGSAPGTSTEPSEGSAPGTSTEPSEGSAPGSSTPSGATGSPGSSPSASTGTGPGASPGTSSTGSPGSEPATSGSETPGTSESATPESGPGSPAGSPTSTEEGSSTPSGATGSPGSSPSASTGTGPGASPGTSSTGSPGTSESATPESGPGTSTEPSEGSAPGTSTEPSEGSAP

SEQ ID NO: 2245 - protein, 1538 aa, Artificial Sequence
  Description of Artificial Sequence: Synthetic polypeptide
YRQSMNNFQGLRSFGCRFGTCTVQKLAHQIYQFTDKDKDNVAPRSKISPQGYGGSPAGSPTSTEEGTSESATPESGPGTSTEPSEGSAPGSPAGSPTSTEEGTSTEPSEGSAPGTSTEPSEGSAPGTSESATPESGPGSEPATSGSETPGSEPATSGSETPGSPAGSPTSTEEGTSESATPESGPGTSTEPSEGSAPGTSTEPSEGSAPGSPAGSPTSTEEGTSTEPSEGSAPGTSTEPSEGSAPGTSESATPESGPGTSTEPSEGSAPGTSESATPESGPGSEPATSGSETPGTSTEPSEGSAPGTSTEPSEGSAPGTSESATPESGPGTSESATPESGPGSPAGSPTSTEEGTSESATPESGPGSEPATSGSETPGTSESATPESGPGTSTEPSEGSAPGTSTEPSEGSAPGTSTEPSEGSAPGTSTEPSEGSAPGTSTEPSEGSAPGTSTEPSEGSAPGSPAGSPTSTEEGTSTEPSEGSAPGTSESATPESGPGSEPATSGSETPGTSESATPESGPGSEPATSGSETPGTSESATPESGPGTSTEPSEGSAPGTSESATPESGPGSPAGSPTSTEEGSPAGSPTSTEEGSPAGSPTSTEEGTSESATPESGPGTSTEPSEGSAPGSPKMVQGSGGFGRKMDRISSSSGLGCKVLRRHGGTSTEPSEGSAPGSEPATSGSETPGSPAGSPTSTEEGSTSSTAESPGPGTSTPESGSASPGSTSESPSGTAPGSTSESPSGTAPGTSTPESGSASPGTSTPESGSASPGSEPATSGSETPGTSESATPESGPGSPAGSPTSTEEGTSTEPSEGSAPGTSESATPESGPGTSTEPSEGSAPGTSTEPSEGSAPGSPAGSPTSTEEGTSTEPSEGSAPGTSTEPSEGSAPGTSESATPESGPGTSESATPESGPGTSTEPSEGSAPGTSTEPSEGSAPGTSESATPESGPGTSTEPSEGSAPGSEPATSGSETPGSPAGSPTSTEEGSSTPSGATGSPGTPGSGTASSSPGSSTPSGATGSPGTSTEPSEGSAPGTSTEPSEGSAPGSEPATSGSETPGSPAGSPTSTEEGSPAGSPTSTEEGTSTEPSEGSAPGASASGAPSTGGTSESATPESGPGSPAGSPTSTEEGSPAGSPTSTEEGSTSSTAESPGPGSTSESPSGTAPGTSPSGESSTAPGTPGSGTASSSPGSSTPSGATGSPGSSPSASTGTGPGSEPATSGSETPGTSESATPESGPGSEPATSGSETPGSTSSTAESPGPGSTSSTAESPGPGTSPSGESSTAPGSEPATSGSETPGSEPATSGSETPGTSTEPSEGSAPGSTSSTAESPGPGTSTPESGSASPGSTSESPSGTAPGTSTEPSEGSAPGTSTEPSEGSAPGTSTEPSEGSAPGSSTPSGATGSPGSSPSASTGTGPGASPGTSSTGSPGSEPATSGSETPGTSESATPESGPGSPAGSPTSTEEGSSTPSGATGSPGSSPSASTGTGPGASPGTSSTGSPGTSESATPESGPGTSTEPSEGSAPGTSTEPSEGSAP

SEQ ID NO: 2246 - protein, 1528 aa, Artificial Sequence
  Description of Artificial Sequence: Synthetic polypeptide
YRQSMNNFQGLRSFGCRFGTCTVQKLAHQIYQFTDKDKDNVAPRSKISPQGYGGSPAGSPTSTEEGTSESATPESGPGTSTEPSEGSAPGSPAGSPTSTEEGTSTEPSEGSAPGTSTEPSEGSAPGTSESATPESGPGSEPATSGSETPGSEPATSGSETPGSPAGSPTSTEEGTSESATPESGPGTSTEPSEGSAPGTSTEPSEGSAPGSPAGSPTSTEEGTSTEPSEGSAPGTSTEPSEGSAPGTSESATPESGPGTSTEPSEGSAPGTSESATPESGPGSEPATSGSETPGTSTEPSEGSAPGTSTEPSEGSAPGTSESATPESGPGTSESATPESGPGSPAGSPTSTEEGTSESATPESGPGSEPATSGSETPGTSESATPESGPGTSTEPSEGSAPGTSTEPSEGSAPGTSTEPSEGSAPGTSTEPSEGSAPGTSTEPSEGSAPGTSTEPSEGSAPGSPAGSPTSTEEGTSTEPSEGSAPGTSESATPESGPGSEPATSGSETPGTSESATPESGPGSEPATSGSETPGTSESATPESGPGTSTEPSEGSAPGTSESATPESGPGSPAGSPTSTEEGSPAGSPTSTEEGSPAGSPTSTEEGTSESATPESGPGTSTEPSEGSAPGGLSKGCFGLKLDRIGSMSGLGCGGTSTEPSEGSAPGSEPATSGSETPGSPAGSPTSTEEGSTSSTAESPGPGTSTPESGSASPGSTSESPSGTAPGSTSESPSGTAPGTSTPESGSASPGTSTPESGSASPGSEPATSGSETPGTSESATPESGPGSPAGSPTSTEEGTSTEPSEGSAPGTSESATPESGPGTSTEPSEGSAPGTSTEPSEGSAPGSPAGSPTSTEEGTSTEPSEGSAPGTSTEPSEGSAPGTSESATPESGPGTSESATPESGPGTSTEPSEGSAPGTSTEPSEGSAPGTSESATPESGPGTSTEPSEGSAPGSEPATSGSETPGSPAGSPTSTEEGSSTPSGATGSPGTPGSGTASSSPGSSTPSGATGSPGTSTEPSEGSAPGTSTEPSEGSAPGSEPATSGSETPGSPAGSPTSTEEGSPAGSPTSTEEGTSTEPSEGSAPGASASGAPSTGGTSESATPESGPGSPAGSPTSTEEGSPAGSPTSTEEGSTSSTAESPGPGSTSESPSGTAPGTSPSGESSTAPGTPGSGTASSSPGSSTPSGATGSPGSSPSASTGTGPGSEPATSGSETPGTSESATPESGPGSEPATSGSETPGSTSSTAESPGPGSTSSTAESPGPGTSPSGESSTAPGSEPATSGSETPGSEPATSGSETPGTSTEPSEGSAPGSTSSTAESPGPGTSTPESGSASPGSTSESPSGTAPGTSTEPSEGSAPGTSTEPSEGSAPGTSTEPSEGSAPGSSTPSGATGSPGSSPSASTGTGPGASPGTSSTGSPGSEPATSGSETPGTSESATPESGPGSPAGSPTSTEEGSSTPSGATGSPGSSPSASTGTGPGASPGTSSTGSPGTSESATPESGPGTSTEPSEGSAPGTSTEPSEGSAP

SEQ ID NO: 2247 - protein, 1538 aa, Artificial Sequence
  Description of Artificial Sequence: Synthetic polypeptide
YRQSMNNFQGLRSFGCRFGTCTVQKLAHQIYQFTDKDKDNVAPRSKISPQGYGGSPAGSPTSTEEGTSESATPESGPGTSTEPSEGSAPGSPAGSPTSTEEGTSTEPSEGSAPGTSTEPSEGSAPGTSESATPESGPGSEPATSGSETPGSEPATSGSETPGSPAGSPTSTEEGTSESATPESGPGTSTEPSEGSAPGTSTEPSEGSAPGSPAGSPTSTEEGTSTEPSEGSAPGTSTEPSEGSAPGTSESATPESGPGTSTEPSEGSAPGTSESATPESGPGSEPATSGSETPGTSTEPSEGSAPGTSTEPSEGSAPGTSESATPESGPGTSESATPESGPGSPAGSPTSTEEGTSESATPESGPGSEPATSGSETPGTSESATPESGPGTSTEPSEGSAPGTSTEPSEGSAPGTSTEPSEGSAPGTSTEPSEGSAPGTSTEPSEGSAPGTSTEPSEGSAPGSPAGSPTSTEEGTSTEPSEGSAPGTSESATPESGPGSEPATSGSETPGTSESATPESGPGSEPATSGSETPGTSESATPESGPGTSTEPSEGSAPGTSESATPESGPGSPAGSPTSTEEGSPAGSPTSTEEGSPAGSPTSTEEGTSESATPESGPGTSTEPSEGSAPGTAPRSLRRSSCFGGRMDRIGAQSGLGCNSFRYGGTSTEPSEGSAPGSEPATSGSETPGSPAGSPTSTEEGSTSSTAESPGPGTSTPESGSASPGSTSESPSGTAPGSTSESPSGTAPGTSTPESGSASPGTSTPESGSASPGSEPATSGSETPGTSESATPESGPGSPAGSPTSTEEGTSTEPSEGSAPGTSESATPESGPGTSTEPSEGSAPGTSTEPSEGSAPGSPAGSPTSTEEGTSTEPSEGSAPGTSTEPSEGSAPGTSESATPESGPGTSESATPESGPGTSTEPSEGSAPGTSTEPSEGSAPGTSESATPESGPGTSTEPSEGSAPGSEPATSGSETPGSPAGSPTSTEEGSSTPSGATGSPGTPGSGTASSSPGSSTPSGATGSPGTSTEPSEGSAPGTSTEPSEGSAPGSEPATSGSETPGSPAGSPTSTEEGSPAGSPTSTEEGTSTEPSEGSAPGASASGAPSTGGTSESATPESGPGSPAGSPTSTEEGSPAGSPTSTEEGSTSSTAESPGPGSTSESPSGTAPGTSPSGESSTAPGTPGSGTASSSPGSSTPSGATGSPGSSPSASTGTGPGSEPATSGSETPGTSESATPESGPGSEPATSGSETPGSTSSTAESPGPGSTSSTAESPGPGTSPSGESSTAPGSEPATSGSETPGSEPATSGSETPGTSTEPSEGSAPGSTSSTAESPGPGTSTPESGSASPGSTSESPSGTAPGTSTEPSEGSAPGTSTEPSEGSAPGTSTEPSEGSAPGSSTPSGATGSPGSSPSASTGTGPGASPGTSSTGSPGSEPATSGSETPGTSESATPESGPGSPAGSPTSTEEGSSTPSGATGSPGSSPSASTGTGPGASPGTSSTGSPGTSESATPESGPGTSTEPSEGSAPGTSTEPSEGSAP

SEQ ID NO: 2248 - protein, 1547 aa, Artificial Sequence
  Description of Artificial Sequence: Synthetic polypeptide
YRQSMNNFQGLRSFGCRFGTCTVQKLAHQIYQFTDKDKDNVAPRSKISPQGYGGSPAGSPTSTEEGTSESATPESGPGTSTEPSEGSAPGSPAGSPTSTEEGTSTEPSEGSAPGTSTEPSEGSAPGTSESATPESGPGSEPATSGSETPGSEPATSGSETPGSPAGSPTSTEEGTSESATPESGPGTSTEPSEGSAPGTSTEPSEGSAPGSPAGSPTSTEEGTSTEPSEGSAPGTSTEPSEGSAPGTSESATPESGPGTSTEPSEGSAPGTSESATPESGPGSEPATSGSETPGTSTEPSEGSAPGTSTEPSEGSAPGTSESATPESGPGTSESATPESGPGSPAGSPTSTEEGTSESATPESGPGSEPATSGSETPGTSESATPESGPGTSTEPSEGSAPGTSTEPSEGSAPGTSTEPSEGSAPGTSTEPSEGSAPGTSTEPSEGSAPGTSTEPSEGSAPGSPAGSPTSTEEGTSTEPSEGSAPGTSESATPESGPGSEPATSGSETPGTSESATPESGPGSEPATSGSETPGTSESATPESGPGTSTEPSEGSAPGTSESATPESGPGSPAGSPTSTEEGSPAGSPTSTEEGSPAGSPTSTEEGTSESATPESGPGTSTEPSEGSAPGIVLSLDVPIGLLQILLEQARARAAREQATTNARILARVGHCGGTSTEPSEGSAPGSEPATSGSETPGSPAGSPTSTEEGSTSSTAESPGPGTSTPESGSASPGSTSESPSGTAPGSTSESPSGTAPGTSTPESGSASPGTSTPESGSASPGSEPATSGSETPGTSESATPESGPGSPAGSPTSTEEGTSTEPSEGSAPGTSESATPESGPGTSTEPSEGSAPGTSTEPSEGSAPGSPAGSPTSTEEGTSTEPSEGSAPGTSTEPSEGSAPGTSESATPESGPGTSESATPESGPGTSTEPSEGSAPGTSTEPSEGSAPGTSESATPESGPGTSTEPSEGSAPGSEPATSGSETPGSPAGSPTSTEEGSSTPSGATGSPGTPGSGTASSSPGSSTPSGATGSPGTSTEPSEGSAPGTSTEPSEGSAPGSEPATSGSETPGSPAGSPTSTEEGSPAGSPTSTEEGTSTEPSEGSAPGASASGAPSTGGTSESATPESGPGSPAGSPTSTEEGSPAGSPTSTEEGSTSSTAESPGPGSTSESPSGTAPGTSPSGESSTAPGTPGSGTASSSPGSSTPSGATGSPGSSPSASTGTGPGSEPATSGSETPGTSESATPESGPGSEPATSGSETPGSTSSTAESPGPGSTSSTAESPGPGTSPSGESSTAPGSEPATSGSETPGSEPATSGSETPGTSTEPSEGSAPGSTSSTAESPGPGTSTPESGSASPGSTSESPSGTAPGTSTEPSEGSAPGTSTEPSEGSAPGTSTEPSEGSAPGSSTPSGATGSPGSSPSASTGTGPGASPGTSSTGSPGSEPATSGSETPGTSESATPESGPGSPAGSPTSTEEGSSTPSGATGSPGSSPSASTGTGPGASPGTSSTGSPGTSESATPESGPGTSTEPSEGSAPGTSTEPSEGSAP

SEQ ID NO: 2249 - protein, 1544 aa, Artificial Sequence
  Description of Artificial Sequence: Synthetic polypeptide
YRQSMNNFQGLRSFGCRFGTCTVQKLAHQIYQFTDKDKDNVAPRSKISPQGYGGSPAGSPTSTEEGTSESATPESGPGTSTEPSEGSAPGSPAGSPTSTEEGTSTEPSEGSAPGTSTEPSEGSAPGTSESATPESGPGSEPATSGSETPGSEPATSGSETPGSPAGSPTSTEEGTSESATPESGPGTSTEPSEGSAPGTSTEPSEGSAPGSPAGSPTSTEEGTSTEPSEGSAPGTSTEPSEGSAPGTSESATPESGPGTSTEPSEGSAPGTSESATPESGPGSEPATSGSETPGTSTEPSEGSAPGTSTEPSEGSAPGTSESATPESGPGTSESATPESGPGSPAGSPTSTEEGTSESATPESGPGSEPATSGSETPGTSESATPESGPGTSTEPSEGSAPGTSTEPSEGSAPGTSTEPSEGSAPGTSTEPSEGSAPGTSTEPSEGSAPGTSTEPSEGSAPGSPAGSPTSTEEGTSTEPSEGSAPGTSESATPESGPGSEPATSGSETPGTSESATPESGPGSEPATSGSETPGTSESATPESGPGTSTEPSEGSAPGTSESATPESGPGSPAGSPTSTEEGSPAGSPTSTEEGSPAGSPTSTEEGTSESATPESGPGTSTEPSEGSAPGFTLSLDVPTNIMNLLFNIAKAKNLRAQAAANAHLMAQIGGTSTEPSEGSAPGSEPATSGSETPGSPAGSPTSTEEGSTSSTAESPGPGTSTPESGSASPGSTSESPSGTAPGSTSESPSGTAPGTSTPESGSASPGTSTPESGSASPGSEPATSGSETPGTSESATPESGPGSPAGSPTSTEEGTSTEPSEGSAPGTSESATPESGPGTSTEPSEGSAPGTSTEPSEGSAPGSPAGSPTSTEEGTSTEPSEGSAPGTSTEPSEGSAPGTSESATPESGPGTSESATPESGPGTSTEPSEGSAPGTSTEPSEGSAPGTSESATPESGPGTSTEPSEGSAPGSEPATSGSETPGSPAGSPTSTEEGSSTPSGATGSPGTPGSGTASSSPGSSTPSGATGSPGTSTEPSEGSAPGTSTEPSEGSAPGSEPATSGSETPGSPAGSPTSTEEGSPAGSPTSTEEGTSTEPSEGSAPGASASGAPSTGGTSESATPESGPGSPAGSPTSTEEGSPAGSPTSTEEGSTSSTAESPGPGSTSESPSGTAPGTSPSGESSTAPGTPGSGTASSSPGSSTPSGATGSPGSSPSASTGTGPGSEPATSGSETPGTSESATPESGPGSEPATSGSETPGSTSSTAESPGPGSTSSTAESPGPGTSPSGESSTAPGSEPATSGSETPGSEPATSGSETPGTSTEPSEGSAPGSTSSTAESPGPGTSTPESGSASPGSTSESPSGTAPGTSTEPSEGSAPGTSTEPSEGSAPGTSTEPSEGSAPGSSTPSGATGSPGSSPSASTGTGPGASPGTSSTGSPGSEPATSGSETPGTSESATPESGPGSPAGSPTSTEEGSSTPSGATGSPGSSPSASTGTGPGASPGTSSTGSPGTSESATPESGPGTSTEPSEGSAPGTSTEPSEGSAP

SEQ ID NO: 2250 - protein, 1534 aa, Artificial Sequence
  Description of Artificial Sequence: Synthetic polypeptide
SLRRSSCFGGRMDRIGAQSGLGCNSFRYGGSPAGSPTSTEEGTSESATPESGPGTSTEPSEGSAPGSPAGSPTSTEEGTSTEPSEGSAPGTSTEPSEGSAPGTSESATPESGPGSEPATSGSETPGSEPATSGSETPGSPAGSPTSTEEGTSESATPESGPGTSTEPSEGSAPGTSTEPSEGSAPGSPAGSPTSTEEGTSTEPSEGSAPGTSTEPSEGSAPGTSESATPESGPGTSTEPSEGSAPGTSESATPESGPGSEPATSGSETPGTSTEPSEGSAPGTSTEPSEGSAPGTSESATPESGPGTSESATPESGPGSPAGSPTSTEEGTSESATPESGPGSEPATSGSETPGTSESATPESGPGTSTEPSEGSAPGTSTEPSEGSAPGTSTEPSEGSAPGTSTEPSEGSAPGTSTEPSEGSAPGTSTEPSEGSAPGSPAGSPTSTEEGTSTEPSEGSAPGTSESATPESGPGSEPATSGSETPGTSESATPESGPGSEPATSGSETPGTSESATPESGPGTSTEPSEGSAPGTSESATPESGPGSPAGSPTSTEEGSPAGSPTSTEEGSPAGSPTSTEEGTSESATPESGPGTSTEPSEGSAPGYRQSMNNFQGLRSFGCRFGTCTVQKLAHQIYQFTDKDKDNVAPRSKISPQGYGGTSTEPSEGSAPGSEPATSGSETPGSPAGSPTSTEEGSTSSTAESPGPGTSTPESGSASPGSTSESPSGTAPGSTSESPSGTAPGTSTPESGSASPGTSTPESGSASPGSEPATSGSETPGTSESATPESGPGSPAGSPTSTEEGTSTEPSEGSAPGTSESATPESGPGTSTEPSEGSAPGTSTEPSEGSAPGSPAGSPTSTEEGTSTEPSEGSAPGTSTEPSEGSAPGTSESATPESGPGTSESATPESGPGTSTEPSEGSAPGTSTEPSEGSAPGTSESATPESGPGTSTEPSEGSAPGSEPATSGSETPGSPAGSPTSTEEGSSTPSGATGSPGTPGSGTASSSPGSSTPSGATGSPGTSTEPSEGSAPGTSTEPSEGSAPGSEPATSGSETPGSPAGSPTSTEEGSPAGSPTSTEEGTSTEPSEGSAPGASASGAPSTGGTSESATPESGPGSPAGSPTSTEEGSPAGSPTSTEEGSTSSTAESPGPGSTSESPSGTAPGTSPSGESSTAPGTPGSGTASSSPGSSTPSGATGSPGSSPSASTGTGPGSEPATSGSETPGTSESATPESGPGSEPATSGSETPGSTSSTAESPGPGSTSSTAESPGPGTSPSGESSTAPGSEPATSGSETPGSEPATSGSETPGTSTEPSEGSAPGSTSSTAESPGPGTSTPESGSASPGSTSESPSGTAPGTSTEPSEGSAPGTSTEPSEGSAPGTSTEPSEGSAPGSSTPSGATGSPGSSPSASTGTGPGASPGTSSTGSPGSEPATSGSETPGTSESATPESGPGSPAGSPTSTEEGSSTPSGATGSPGSSPSASTGTGPGASPGTSSTGSPGTSESATPESGPGTSTEPSEGSAPGTSTEPSEGSAP

SEQ ID NO: 2251 - protein, 1538 aa, Artificial Sequence
  Description of Artificial Sequence: Synthetic polypeptide
SPKMVQGSGGFGRKMDRISSSSGLGCKVLRRHGGSPAGSPTSTEEGTSESATPESGPGTSTEPSEGSAPGSPAGSPTSTEEGTSTEPSEGSAPGTSTEPSEGSAPGTSESATPESGPGSEPATSGSETPGSEPATSGSETPGSPAGSPTSTEEGTSESATPESGPGTSTEPSEGSAPGTSTEPSEGSAPGSPAGSPTSTEEGTSTEPSEGSAPGTSTEPSEGSAPGTSESATPESGPGTSTEPSEGSAPGTSESATPESGPGSEPATSGSETPGTSTEPSEGSAPGTSTEPSEGSAPGTSESATPESGPGTSESATPESGPGSPAGSPTSTEEGTSESATPESGPGSEPATSGSETPGTSESATPESGPGTSTEPSEGSAPGTSTEPSEGSAPGTSTEPSEGSAPGTSTEPSEGSAPGTSTEPSEGSAPGTSTEPSEGSAPGSPAGSPTSTEEGTSTEPSEGSAPGTSESATPESGPGSEPATSGSETPGTSESATPESGPGSEPATSGSETPGTSESATPESGPGTSTEPSEGSAPGTSESATPESGPGSPAGSPTSTEEGSPAGSPTSTEEGSPAGSPTSTEEGTSESATPESGPGTSTEPSEGSAPGYRQSMNNFQGLRSFGCRFGTCTVQKLAHQIYQFTDKDKDNVAPRSKISPQGYGGTSTEPSEGSAPGSEPATSGSETPGSPAGSPTSTEEGSTSSTAESPGPGTSTPESGSASPGSTSESPSGTAPGSTSESPSGTAPGTSTPESGSASPGTSTPESGSASPGSEPATSGSETPGTSESATPESGPGSPAGSPTSTEEGTSTEPSEGSAPGTSESATPESGPGTSTEPSEGSAPGTSTEPSEGSAPGSPAGSPTSTEEGTSTEPSEGSAPGTSTEPSEGSAPGTSESATPESGPGTSESATPESGPGTSTEPSEGSAPGTSTEPSEGSAPGTSESATPESGPGTSTEPSEGSAPGSEPATSGSETPGSPAGSPTSTEEGSSTPSGATGSPGTPGSGTASSSPGSSTPSGATGSPGTSTEPSEGSAPGTSTEPSEGSAPGSEPATSGSETPGSPAGSPTSTEEGSPAGSPTSTEEGTSTEPSEGSAPGASASGAPSTGGTSESATPESGPGSPAGSPTSTEEGSPAGSPTSTEEGSTSSTAESPGPGSTSESPSGTAPGTSPSGESSTAPGTPGSGTASSSPGSSTPSGATGSPGSSPSASTGTGPGSEPATSGSETPGTSESATPESGPGSEPATSGSETPGSTSSTAESPGPGSTSSTAESPGPGTSPSGESSTAPGSEPATSGSETPGSEPATSGSETPGTSTEPSEGSAPGSTSSTAESPGPGTSTPESGSASPGSTSESPSGTAPGTSTEPSEGSAPGTSTEPSEGSAPGTSTEPSEGSAPGSSTPSGATGSPGSSPSASTGTGPGASPGTSSTGSPGSEPATSGSETPGTSESATPESGPGSPAGSPTSTEEGSSTPSGATGSPGSSPSASTGTGPGASPGTSSTGSPGTSESATPESGPGTSTEPSEGSAPGTSTEPSEGSAP

SEQ ID NO: 2252 - protein, 1528 aa, Artificial Sequence
  Description of Artificial Sequence: Synthetic polypeptide
GLSKGCFGLKLDRIGSMSGLGCGGSPAGSPTSTEEGTSESATPESGPGTSTEPSEGSAPGSPAGSPTSTEEGTSTEPSEGSAPGTSTEPSEGSAPGTSESATPESGPGSEPATSGSETPGSEPATSGSETPGSPAGSPTSTEEGTSESATPESGPGTSTEPSEGSAPGTSTEPSEGSAPGSPAGSPTSTEEGTSTEPSEGSAPGTSTEPSEGSAPGTSESATPESGPGTSTEPSEGSAPGTSESATPESGPGSEPATSGSETPGTSTEPSEGSAPGTSTEPSEGSAPGTSESATPESGPGTSESATPESGPGSPAGSPTSTEEGTSESATPESGPGSEPATSGSETPGTSESATPESGPGTSTEPSEGSAPGTSTEPSEGSAPGTSTEPSEGSAPGTSTEPSEGSAPGTSTEPSEGSAPGTSTEPSEGSAPGSPAGSPTSTEEGTSTEPSEGSAPGTSESATPESGPGSEPATSGSETPGTSESATPESGPGSEPATSGSETPGTSESATPESGPGTSTEPSEGSAPGTSESATPESGPGSPAGSPTSTEEGSPAGSPTSTEEGSPAGSPTSTEEGTSESATPESGPGTSTEPSEGSAPGYRQSMNNFQGLRSFGCRFGTCTVQKLAHQIYQFTDKDKDNVAPRSKISPQGYGGTSTEPSEGSAPGSEPATSGSETPGSPAGSPTSTEEGSTSSTAESPGPGTSTPESGSASPGSTSESPSGTAPGSTSESPSGTAPGTSTPESGSASPGTSTPESGSASPGSEPATSGSETPGTSESATPESGPGSPAGSPTSTEEGTSTEPSEGSAPGTSESATPESGPGTSTEPSEGSAPGTSTEPSEGSAPGSPAGSPTSTEEGTSTEPSEGSAPGTSTEPSEGSAPGTSESATPESGPGTSESATPESGPGTSTEPSEGSAPGTSTEPSEGSAPGTSESATPESGPGTSTEPSEGSAPGSEPATSGSETPGSPAGSPTSTEEGSSTPSGATGSPGTPGSGTASSSPGSSTPSGATGSPGTSTEPSEGSAPGTSTEPSEGSAPGSEPATSGSETPGSPAGSPTSTEEGSPAGSPTSTEEGTSTEPSEGSAPGASASGAPSTGGTSESATPESGPGSPAGSPTSTEEGSPAGSPTSTEEGSTSSTAESPGPGSTSESPSGTAPGTSPSGESSTAPGTPGSGTASSSPGSSTPSGATGSPGSSPSASTGTGPGSEPATSGSETPGTSESATPESGPGSEPATSGSETPGSTSSTAESPGPGSTSSTAESPGPGTSPSGESSTAPGSEPATSGSETPGSEPATSGSETPGTSTEPSEGSAPGSTSSTAESPGPGTSTPESGSASPGSTSESPSGTAPGTSTEPSEGSAPGTSTEPSEGSAPGTSTEPSEGSAPGSSTPSGATGSPGSSPSASTGTGPGASPGTSSTGSPGSEPATSGSETPGTSESATPESGPGSPAGSPTSTEEGSSTPSGATGSPGSSPSASTGTGPGASPGTSSTGSPGTSESATPESGPGTSTEPSEGSAPGTSTEPSEGSAP

SEQ ID NO: 2253 - protein, 1538 aa, Artificial Sequence
  Description of Artificial Sequence: Synthetic polypeptide
TAPRSLRRSSCFGGRMDRIGAQSGLGCNSFRYGGSPAGSPTSTEEGTSESATPESGPGTSTEPSEGSAPGSPAGSPTSTEEGTSTEPSEGSAPGTSTEPSEGSAPGTSESATPESGPGSEPATSGSETPGSEPATSGSETPGSPAGSPTSTEEGTSESATPESGPGTSTEPSEGSAPGTSTEPSEGSAPGSPAGSPTSTEEGTSTEPSEGSAPGTSTEPSEGSAPGTSESATPESGPGTSTEPSEGSAPGTSESATPESGPGSEPATSGSETPGTSTEPSEGSAPGTSTEPSEGSAPGTSESATPESGPGTSESATPESGPGSPAGSPTSTEEGTSESATPESGPGSEPATSGSETPGTSESATPESGPGTSTEPSEGSAPGTSTEPSEGSAPGTSTEPSEGSAPGTSTEPSEGSAPGTSTEPSEGSAPGTSTEPSEGSAPGSPAGSPTSTEEGTSTEPSEGSAPGTSESATPESGPGSEPATSGSETPGTSESATPESGPGSEPATSGSETPGTSESATPESGPGTSTEPSEGSAPGTSESATPESGPGSPAGSPTSTEEGSPAGSPTSTEEGSPAGSPTSTEEGTSESATPESGPGTSTEPSEGSAPGYRQSMNNFQGLRSFGCRFGTCTVQKLAHQIYQFTDKDKDNVAPRSKISPQGYGGTSTEPSEGSAPGSEPATSGSETPGSPAGSPTSTEEGSTSSTAESPGPGTSTPESGSASPGSTSESPSGTAPGSTSESPSGTAPGTSTPESGSASPGTSTPESGSASPGSEPATSGSETPGTSESATPESGPGSPAGSPTSTEEGTSTEPSEGSAPGTSESATPESGPGTSTEPSEGSAPGTSTEPSEGSAPGSPAGSPTSTEEGTSTEPSEGSAPGTSTEPSEGSAPGTSESATPESGPGTSESATPESGPGTSTEPSEGSAPGTSTEPSEGSAPGTSESATPESGPGTSTEPSEGSAPGSEPATSGSETPGSPAGSPTSTEEGSSTPSGATGSPGTPGSGTASSSPGSSTPSGATGSPGTSTEPSEGSAPGTSTEPSEGSAPGSEPATSGSETPGSPAGSPTSTEEGSPAGSPTSTEEGTSTEPSEGSAPGASASGAPSTGGTSESATPESGPGSPAGSPTSTEEGSPAGSPTSTEEGSTSSTAESPGPGSTSESPSGTAPGTSPSGESSTAPGTPGSGTASSSPGSSTPSGATGSPGSSPSASTGTGPGSEPATSGSETPGTSESATPESGPGSEPATSGSETPGSTSSTAESPGPGSTSSTAESPGPGTSPSGESSTAPGSEPATSGSETPGSEPATSGSETPGTSTEPSEGSAPGSTSSTAESPGPGTSTPESGSASPGSTSESPSGTAPGTSTEPSEGSAPGTSTEPSEGSAPGTSTEPSEGSAPGSSTPSGATGSPGSSPSASTGTGPGASPGTSSTGSPGSEPATSGSETPGTSESATPESGPGSPAGSPTSTEEGSSTPSGATGSPGSSPSASTGTGPGASPGTSSTGSPGTSESATPESGPGTSTEPSEGSAPGTSTEPSEGSAP

SEQ ID NO: 2254 - protein, 1547 aa, Artificial Sequence
  Description of Artificial Sequence: Synthetic polypeptide
IVLSLDVPIGLLQILLEQARARAAREQATTNARILARVGHCGGSPAGSPTSTEEGTSESATPESGPGTSTEPSEGSAPGSPAGSPTSTEEGTSTEPSEGSAPGTSTEPSEGSAPGTSESATPESGPGSEPATSGSETPGSEPATSGSETPGSPAGSPTSTEEGTSESATPESGPGTSTEPSEGSAPGTSTEPSEGSAPGSPAGSPTSTEEGTSTEPSEGSAPGTSTEPSEGSAPGTSESATPESGPGTSTEPSEGSAPGTSESATPESGPGSEPATSGSETPGTSTEPSEGSAPGTSTEPSEGSAPGTSESATPESGPGTSESATPESGPGSPAGSPTSTEEGTSESATPESGPGSEPATSGSETPGTSESATPESGPGTSTEPSEGSAPGTSTEPSEGSAPGTSTEPSEGSAPGTSTEPSEGSAPGTSTEPSEGSAPGTSTEPSEGSAPGSPAGSPTSTEEGTSTEPSEGSAPGTSESATPESGPGSEPATSGSETPGTSESATPESGPGSEPATSGSETPGTSESATPESGPGTSTEPSEGSAPGTSESATPESGPGSPAGSPTSTEEGSPAGSPTSTEEGSPAGSPTSTEEGTSESATPESGPGTSTEPSEGSAPGYRQSMNNFQGLRSFGCRFGTCTVQKLAHQIYQFTDKDKDNVAPRSKISPQGYGGTSTEPSEGSAPGSEPATSGSETPGSPAGSPTSTEEGSTSSTAESPGPGTSTPESGSASPGSTSESPSGTAPGSTSESPSGTAPGTSTPESGSASPGTSTPESGSASPGSEPATSGSETPGTSESATPESGPGSPAGSPTSTEEGTSTEPSEGSAPGTSESATPESGPGTSTEPSEGSAPGTSTEPSEGSAPGSPAGSPTSTEEGTSTEPSEGSAPGTSTEPSEGSAPGTSESATPESGPGTSESATPESGPGTSTEPSEGSAPGTSTEPSEGSAPGTSESATPESGPGTSTEPSEGSAPGSEPATSGSETPGSPAGSPTSTEEGSSTPSGATGSPGTPGSGTASSSPGSSTPSGATGSPGTSTEPSEGSAPGTSTEPSEGSAPGSEPATSGSETPGSPAGSPTSTEEGSPAGSPTSTEEGTSTEPSEGSAPGASASGAPSTGGTSESATPESGPGSPAGSPTSTEEGSPAGSPTSTEEGSTSSTAESPGPGSTSESPSGTAPGTSPSGESSTAPGTPGSGTASSSPGSSTPSGATGSPGSSPSASTGTGPGSEPATSGSETPGTSESATPESGPGSEPATSGSETPGSTSSTAESPGPGSTSSTAESPGPGTSPSGESSTAPGSEPATSGSETPGSEPATSGSETPGTSTEPSEGSAPGSTSSTAESPGPGTSTPESGSASPGSTSESPSGTAPGTSTEPSEGSAPGTSTEPSEGSAPGTSTEPSEGSAPGSSTPSGATGSPGSSPSASTGTGPGASPGTSSTGSPGSEPATSGSETPGTSESATPESGPGSPAGSPTSTEEGSSTPSGATGSPGSSPSASTGTGPGASPGTSSTGSPGTSESATPESGPGTSTEPSEGSAPGTSTEPSEGSAP

SEQ ID NO: 2255 - protein, 1544 aa, Artificial Sequence
  Description of Artificial Sequence: Synthetic polypeptide
FTLSLDVPTNIMNLLFNIAKAKNLRAQAAANAHLMAQIGGSPAGSPTSTEEGTSESATPESGPGTSTEPSEGSAPGSPAGSPTSTEEGTSTEPSEGSAPGTSTEPSEGSAPGTSESATPESGPGSEPATSGSETPGSEPATSGSETPGSPAGSPTSTEEGTSESATPESGPGTSTEPSEGSAPGTSTEPSEGSAPGSPAGSPTSTEEGTSTEPSEGSAPGTSTEPSEGSAPGTSESATPESGPGTSTEPSEGSAPGTSESATPESGPGSEPATSGSETPGTSTEPSEGSAPGTSTEPSEGSAPGTSESATPESGPGTSESATPESGPGSPAGSPTSTEEGTSESATPESGPGSEPATSGSETPGTSESATPESGPGTSTEPSEGSAPGTSTEPSEGSAPGTSTEPSEGSAPGTSTEPSEGSAPGTSTEPSEGSAPGTSTEPSEGSAPGSPAGSPTSTEEGTSTEPSEGSAPGTSESATPESGPGSEPATSGSETPGTSESATPESGPGSEPATSGSETPGTSESATPESGPGTSTEPSEGSAPGTSESATPESGPGSPAGSPTSTEEGSPAGSPTSTEEGSPAGSPTSTEEGTSESATPESGPGTSTEPSEGSAPGYRQSMNNFQGLRSFGCRFGTCTVQKLAHQIYQFTDKDKDNVAPRSKISPQGYGGTSTEPSEGSAPGSEPATSGSETPGSPAGSPTSTEEGSTSSTAESPGPGTSTPESGSASPGSTSESPSGTAPGSTSESPSGTAPGTSTPESGSASPGTSTPESGSASPGSEPATSGSETPGTSESATPESGPGSPAGSPTSTEEGTSTEPSEGSAPGTSESATPESGPGTSTEPSEGSAPGTSTEPSEGSAPGSPAGSPTSTEEGTSTEPSEGSAPGTSTEPSEGSAPGTSESATPESGPGTSESATPESGPGTSTEPSEGSAPGTSTEPSEGSAPGTSESATPESGPGTSTEPSEGSAPGSEPATSGSETPGSPAGSPTSTEEGSSTPSGATGSPGTPGSGTASSSPGSSTPSGATGSPGTSTEPSEGSAPGTSTEPSEGSAPGSEPATSGSETPGSPAGSPTSTEEGSPAGSPTSTEEGTSTEPSEGSAPGASASGAPSTGGTSESATPESGPGSPAGSPTSTEEGSPAGSPTSTEEGSTSSTAESPGPGSTSESPSGTAPGTSPSGESSTAPGTPGSGTASSSPGSSTPSGATGSPGSSPSASTGTGPGSEPATSGSETPGTSESATPESGPGSEPATSGSETPGSTSSTAESPGPGSTSSTAESPGPGTSPSGESSTAPGSEPATSGSETPGSEPATSGSETPGTSTEPSEGSAPGSTSSTAESPGPGTSTPESGSASPGSTSESPSGTAPGTSTEPSEGSAPGTSTEPSEGSAPGTSTEPSEGSAPGSSTPSGATGSPGSSPSASTGTGPGASPGTSSTGSPGSEPATSGSETPGTSESATPESGPGSPAGSPTSTEEGSSTPSGATGSPGSSPSASTGTGPGASPGTSSTGSPGTSESATPESGPGTSTEPSEGSAPGTSTEPSEGSAP

SEQ ID NO: 2256 - protein, 1514 aa, Artificial Sequence
  Description of Artificial Sequence: Synthetic polypeptide
SLRRSSCFGGRMDRIGAQSGLGCNSFRYGGSPAGSPTSTEEGTSESATPESGPGTSTEPSEGSAPGSPAGSPTSTEEGTSTEPSEGSAPGTSTEPSEGSAPGTSESATPESGPGSEPATSGSETPGSEPATSGSETPGSPAGSPTSTEEGTSESATPESGPGTSTEPSEGSAPGTSTEPSEGSAPGSPAGSPTSTEEGTSTEPSEGSAPGTSTEPSEGSAPGTSESATPESGPGTSTEPSEGSAPGTSESATPESGPGSEPATSGSETPGTSTEPSEGSAPGTSTEPSEGSAPGTSESATPESGPGTSESATPESGPGSPAGSPTSTEEGTSESATPESGPGSEPATSGSETPGTSESATPESGPGTSTEPSEGSAPGTSTEPSEGSAPGTSTEPSEGSAPGTSTEPSEGSAPGTSTEPSEGSAPGTSTEPSEGSAPGSPAGSPTSTEEGTSTEPSEGSAPGTSESATPESGPGSEPATSGSETPGTSESATPESGPGSEPATSGSETPGTSESATPESGPGTSTEPSEGSAPGTSESATPESGPGSPAGSPTSTEEGSPAGSPTSTEEGSPAGSPTSTEEGTSESATPESGPGTSTEPSEGSAPGTAPRSLRRSSCFGGRMDRIGAQSGLGCNSFRYGGTSTEPSEGSAPGSEPATSGSETPGSPAGSPTSTEEGSTSSTAESPGPGTSTPESGSASPGSTSESPSGTAPGSTSESPSGTAPGTSTPESGSASPGTSTPESGSASPGSEPATSGSETPGTSESATPESGPGSPAGSPTSTEEGTSTEPSEGSAPGTSESATPESGPGTSTEPSEGSAPGTSTEPSEGSAPGSPAGSPTSTEEGTSTEPSEGSAPGTSTEPSEGSAPGTSESATPESGPGTSESATPESGPGTSTEPSEGSAPGTSTEPSEGSAPGTSESATPESGPGTSTEPSEGSAPGSEPATSGSETPGSPAGSPTSTEEGSSTPSGATGSPGTPGSGTASSSPGSSTPSGATGSPGTSTEPSEGSAPGTSTEPSEGSAPGSEPATSGSETPGSPAGSPTSTEEGSPAGSPTSTEEGTSTEPSEGSAPGASASGAPSTGGTSESATPESGPGSPAGSPTSTEEGSPAGSPTSTEEGSTSSTAESPGPGSTSESPSGTAPGTSPSGESSTAPGTPGSGTASSSPGSSTPSGATGSPGSSPSASTGTGPGSEPATSGSETPGTSESATPESGPGSEPATSGSETPGSTSSTAESPGPGSTSSTAESPGPGTSPSGESSTAPGSEPATSGSETPGSEPATSGSETPGTSTEPSEGSAPGSTSSTAESPGPGTSTPESGSASPGSTSESPSGTAPGTSTEPSEGSAPGTSTEPSEGSAPGTSTEPSEGSAPGSSTPSGATGSPGSSPSASTGTGPGASPGTSSTGSPGSEPATSGSETPGTSESATPESGPGSPAGSPTSTEEGSSTPSGATGSPGSSPSASTGTGPGASPGTSSTGSPGTSESATPESGPGTSTEPSEGSAPGTSTEPSEGSAP

SEQ ID NO: 2257 - protein, 1523 aa, Artificial Sequence
  Description of Artificial Sequence: Synthetic polypeptide
SLRRSSCFGGRMDRIGAQSGLGCNSFRYGGSPAGSPTSTEEGTSESATPESGPGTSTEPSEGSAPGSPAGSPTSTEEGTSTEPSEGSAPGTSTEPSEGSAPGTSESATPESGPGSEPATSGSETPGSEPATSGSETPGSPAGSPTSTEEGTSESATPESGPGTSTEPSEGSAPGTSTEPSEGSAPGSPAGSPTSTEEGTSTEPSEGSAPGTSTEPSEGSAPGTSESATPESGPGTSTEPSEGSAPGTSESATPESGPGSEPATSGSETPGTSTEPSEGSAPGTSTEPSEGSAPGTSESATPESGPGTSESATPESGPGSPAGSPTSTEEGTSESATPESGPGSEPATSGSETPGTSESATPESGPGTSTEPSEGSAPGTSTEPSEGSAPGTSTEPSEGSAPGTSTEPSEGSAPGTSTEPSEGSAPGTSTEPSEGSAPGSPAGSPTSTEEGTSTEPSEGSAPGTSESATPESGPGSEPATSGSETPGTSESATPESGPGSEPATSGSETPGTSESATPESGPGTSTEPSEGSAPGTSESATPESGPGSPAGSPTSTEEGSPAGSPTSTEEGSPAGSPTSTEEGTSESATPESGPGTSTEPSEGSAPGIVLSLDVPIGLLQILLEQARARAAREQATTNARILARVGHCGGTSTEPSEGSAPGSEPATSGSETPGSPAGSPTSTEEGSTSSTAESPGPGTSTPESGSASPGSTSESPSGTAPGSTSESPSGTAPGTSTPESGSASPGTSTPESGSASPGSEPATSGSETPGTSESATPESGPGSPAGSPTSTEEGTSTEPSEGSAPGTSESATPESGPGTSTEPSEGSAPGTSTEPSEGSAPGSPAGSPTSTEEGTSTEPSEGSAPGTSTEPSEGSAPGTSESATPESGPGTSESATPESGPGTSTEPSEGSAPGTSTEPSEGSAPGTSESATPESGPGTSTEPSEGSAPGSEPATSGSETPGSPAGSPTSTEEGSSTPSGATGSPGTPGSGTASSSPGSSTPSGATGSPGTSTEPSEGSAPGTSTEPSEGSAPGSEPATSGSETPGSPAGSPTSTEEGSPAGSPTSTEEGTSTEPSEGSAPGASASGAPSTGGTSESATPESGPGSPAGSPTSTEEGSPAGSPTSTEEGSTSSTAESPGPGSTSESPSGTAPGTSPSGESSTAPGTPGSGTASSSPGSSTPSGATGSPGSSPSASTGTGPGSEPATSGSETPGTSESATPESGPGSEPATSGSETPGSTSSTAESPGPGSTSSTAESPGPGTSPSGESSTAPGSEPATSGSETPGSEPATSGSETPGTSTEPSEGSAPGSTSSTAESPGPGTSTPESGSASPGSTSESPSGTAPGTSTEPSEGSAPGTSTEPSEGSAPGTSTEPSEGSAPGSSTPSGATGSPGSSPSASTGTGPGASPGTSSTGSPGSEPATSGSETPGTSESATPESGPGSPAGSPTSTEEGSSTPSGATGSPGSSPSASTGTGPGASPGTSSTGSPGTSESATPESGPGTSTEPSEGSAPGTSTEPSEGSAP

SEQ ID NO: 2258 - protein, 1520 aa, Artificial Sequence
  Description of Artificial Sequence: Synthetic polypeptide
SLRRSSCFGGRMDRIGAQSGLGCNSFRYGGSPAGSPTSTEEGTSESATPESGPGTSTEPSEGSAPGSPAGSPTSTEEGTSTEPSEGSAPGTSTEPSEGSAPGTSESATPESGPGSEPATSGSETPGSEPATSGSETPGSPAGSPTSTEEGTSESATPESGPGTSTEPSEGSAPGTSTEPSEGSAPGSPAGSPTSTEEGTSTEPSEGSAPGTSTEPSEGSAPGTSESATPESGPGTSTEPSEGSAPGTSESATPESGPGSEPATSGSETPGTSTEPSEGSAPGTSTEPSEGSAPGTSESATPESGPGTSESATPESGPGSPAGSPTSTEEGTSESATPESGPGSEPATSGSETPGTSESATPESGPGTSTEPSEGSAPGTSTEPSEGSAPGTSTEPSEGSAPGTSTEPSEGSAPGTSTEPSEGSAPGTSTEPSEGSAPGSPAGSPTSTEEGTSTEPSEGSAPGTSESATPESGPGSEPATSGSETPGTSESATPESGPGSEPATSGSETPGTSESATPESGPGTSTEPSEGSAPGTSESATPESGPGSPAGSPTSTEEGSPAGSPTSTEEGSPAGSPTSTEEGTSESATPESGPGTSTEPSEGSAPGFTLSLDVPTNIMNLLFNIAKAKNLRAQAAANAHLMAQIGGTSTEPSEGSAPGSEPATSGSETPGSPAGSPTSTEEGSTSSTAESPGPGTSTPESGSASPGSTSESPSGTAPGSTSESPSGTAPGTSTPESGSASPGTSTPESGSASPGSEPATSGSETPGTSESATPESGPGSPAGSPTSTEEGTSTEPSEGSAPGTSESATPESGPGTSTEPSEGSAPGTSTEPSEGSAPGSPAGSPTSTEEGTSTEPSEGSAPGTSTEPSEGSAPGTSESATPESGPGTSESATPESGPGTSTEPSEGSAPGTSTEPSEGSAPGTSESATPESGPGTSTEPSEGSAPGSEPATSGSETPGSPAGSPTSTEEGSSTPSGATGSPGTPGSGTASSSPGSSTPSGATGSPGTSTEPSEGSAPGTSTEPSEGSAPGSEPATSGSETPGSPAGSPTSTEEGSPAGSPTSTEEGTSTEPSEGSAPGASASGAPSTGGTSESATPESGPGSPAGSPTSTEEGSPAGSPTSTEEGSTSSTAESPGPGSTSESPSGTAPGTSPSGESSTAPGTPGSGTASSSPGSSTPSGATGSPGSSPSASTGTGPGSEPATSGSETPGTSESATPESGPGSEPATSGSETPGSTSSTAESPGPGSTSSTAESPGPGTSPSGESSTAPGSEPATSGSETPGSEPATSGSETPGTSTEPSEGSAPGSTSSTAESPGPGTSTPESGSASPGSTSESPSGTAPGTSTEPSEGSAPGTSTEPSEGSAPGTSTEPSEGSAPGSSTPSGATGSPGSSPSASTGTGPGASPGTSSTGSPGSEPATSGSETPGTSESATPESGPGSPAGSPTSTEEGSSTPSGATGSPGSSPSASTGTGPGASPGTSSTGSPGTSESATPESGPGTSTEPSEGSAPGTSTEPSEGSAP

SEQ ID NO: 2259 - protein, 1514 aa, Artificial Sequence
  Description of Artificial Sequence: Synthetic polypeptide
TAPRSLRRSSCFGGRMDRIGAQSGLGCNSFRYGGSPAGSPTSTEEGTSESATPESGPGTSTEPSEGSAPGSPAGSPTSTEEGTSTEPSEGSAPGTSTEPSEGSAPGTSESATPESGPGSEPATSGSETPGSEPATSGSETPGSPAGSPTSTEEGTSESATPESGPGTSTEPSEGSAPGTSTEPSEGSAPGSPAGSPTSTEEGTSTEPSEGSAPGTSTEPSEGSAPGTSESATPESGPGTSTEPSEGSAPGTSESATPESGPGSEPATSGSETPGTSTEPSEGSAPGTSTEPSEGSAPGTSESATPESGPGTSESATPESGPGSPAGSPTSTEEGTSESATPESGPGSEPATSGSETPGTSESATPESGPGTSTEPSEGSAPGTSTEPSEGSAPGTSTEPSEGSAPGTSTEPSEGSAPGTSTEPSEGSAPGTSTEPSEGSAPGSPAGSPTSTEEGTSTEPSEGSAPGTSESATPESGPGSEPATSGSETPGTSESATPESGPGSEPATSGSETPGTSESATPESGPGTSTEPSEGSAPGTSESATPESGPGSPAGSPTSTEEGSPAGSPTSTEEGSPAGSPTSTEEGTSESATPESGPGTSTEPSEGSAPGSLRRSSCFGGRMDRIGAQSGLGCNSFRYGGTSTEPSEGSAPGSEPATSGSETPGSPAGSPTSTEEGSTSSTAESPGPGTSTPESGSASPGSTSESPSGTAPGSTSESPSGTAPGTSTPESGSASPGTSTPESGSASPGSEPATSGSETPGTSESATPESGPGSPAGSPTSTEEGTSTEPSEGSAPGTSESATPESGPGTSTEPSEGSAPGTSTEPSEGSAPGSPAGSPTSTEEGTSTEPSEGSAPGTSTEPSEGSAPGTSESATPESGPGTSESATPESGPGTSTEPSEGSAPGTSTEPSEGSAPGTSESATPESGPGTSTEPSEGSAPGSEPATSGSETPGSPAGSPTSTEEGSSTPSGATGSPGTPGSGTASSSPGSSTPSGATGSPGTSTEPSEGSAPGTSTEPSEGSAPGSEPATSGSETPGSPAGSPTSTEEGSPAGSPTSTEEGTSTEPSEGSAPGASASGAPSTGGTSESATPESGPGSPAGSPTSTEEGSPAGSPTSTEEGSTSSTAESPGPGSTSESPSGTAPGTSPSGESSTAPGTPGSGTASSSPGSSTPSGATGSPGSSPSASTGTGPGSEPATSGSETPGTSESATPESGPGSEPATSGSETPGSTSSTAESPGPGSTSSTAESPGPGTSPSGESSTAPGSEPATSGSETPGSEPATSGSETPGTSTEPSEGSAPGSTSSTAESPGPGTSTPESGSASPGSTSESPSGTAPGTSTEPSEGSAPGTSTEPSEGSAPGTSTEPSEGSAPGSSTPSGATGSPGSSPSASTGTGPGASPGTSSTGSPGSEPATSGSETPGTSESATPESGPGSPAGSPTSTEEGSSTPSGATGSPGSSPSASTGTGPGASPGTSSTGSPGTSESATPESGPGTSTEPSEGSAPGTSTEPSEGSAP

SEQ ID NO: 2260 - protein, 1523 aa, Artificial Sequence
  Description of Artificial Sequence: Synthetic polypeptide
IVLSLDVPIGLLQILLEQARARAAREQATTNARILARVGHCGGSPAGSPTSTEEGTSESATPESGPGTSTEPSEGSAPGSPAGSPTSTEEGTSTEPSEGSAPGTSTEPSEGSAPGTSESATPESGPGSEPATSGSETPGSEPATSGSETPGSPAGSPTSTEEGTSESATPESGPGTSTEPSEGSAPGTSTEPSEGSAPGSPAGSPTSTEEGTSTEPSEGSAPGTSTEPSEGSAPGTSESATPESGPGTSTEPSEGSAPGTSESATPESGPGSEPATSGSETPGTSTEPSEGSAPGTSTEPSEGSAPGTSESATPESGPGTSESATPESGPGSPAGSPTSTEEGTSESATPESGPGSEPATSGSETPGTSESATPESGPGTSTEPSEGSAPGTSTEPSEGSAPGTSTEPSEGSAPGTSTEPSEGSAPGTSTEPSEGSAPGTSTEPSEGSAPGSPAGSPTSTEEGTSTEPSEGSAPGTSESATPESGPGSEPATSGSETPGTSESATPESGPGSEPATSGSETPGTSESATPESGPGTSTEPSEGSAPGTSESATPESGPGSPAGSPTSTEEGSPAGSPTSTEEGSPAGSPTSTEEGTSESATPESGPGTSTEPSEGSAPGSLRRSSCFGGRMDRIGAQSGLGCNSFRYGGTSTEPSEGSAPGSEPATSGSETPGSPAGSPTSTEEGSTSSTAESPGPGTSTPESGSASPGSTSESPSGTAPGSTSESPSGTAPGTSTPESGSASPGTSTPESGSASPGSEPATSGSETPGTSESATPESGPGSPAGSPTSTEEGTSTEPSEGSAPGTSESATPESGPGTSTEPSEGSAPGTSTEPSEGSAPGSPAGSPTSTEEGTSTEPSEGSAPGTSTEPSEGSAPGTSESATPESGPGTSESATPESGPGTSTEPSEGSAPGTSTEPSEGSAPGTSESATPESGPGTSTEPSEGSAPGSEPATSGSETPGSPAGSPTSTEEGSSTPSGATGSPGTPGSGTASSSPGSSTPSGATGSPGTSTEPSEGSAPGTSTEPSEGSAPGSEPATSGSETPGSPAGSPTSTEEGSPAGSPTSTEEGTSTEPSEGSAPGASASGAPSTGGTSESATPESGPGSPAGSPTSTEEGSPAGSPTSTEEGSTSSTAESPGPGSTSESPSGTAPGTSPSGESSTAPGTPGSGTASSSPGSSTPSGATGSPGSSPSASTGTGPGSEPATSGSETPGTSESATPESGPGSEPATSGSETPGSTSSTAESPGPGSTSSTAESPGPGTSPSGESSTAPGSEPATSGSETPGSEPATSGSETPGTSTEPSEGSAPGSTSSTAESPGPGTSTPESGSASPGSTSESPSGTAPGTSTEPSEGSAPGTSTEPSEGSAPGTSTEPSEGSAPGSSTPSGATGSPGSSPSASTGTGPGASPGTSSTGSPGSEPATSGSETPGTSESATPESGPGSPAGSPTSTEEGSSTPSGATGSPGSSPSASTGTGPGASPGTSSTGSPGTSESATPESGPGTSTEPSEGSAPGTSTEPSEGSAP

SEQ ID NO: 2261 - protein, 1520 aa, Artificial Sequence
  Description of Artificial Sequence: Synthetic polypeptide
FTLSLDVPTNIMNLLFNIAKAKNLRAQAAANAHLMAQIGGSPAGSPTSTEEGTSESATPESGPGTSTEPSEGSAPGSPAGSPTSTEEGTSTEPSEGSAPGTSTEPSEGSAPGTSESATPESGPGSEPATSGSETPGSEPATSGSETPGSPAGSPTSTEEGTSESATPESGPGTSTEPSEGSAPGTSTEPSEGSAPGSPAGSPTSTEEGTSTEPSEGSAPGTSTEPSEGSAPGTSESATPESGPGTSTEPSEGSAPGTSESATPESGPGSEPATSGSETPGTSTEPSEGSAPGTSTEPSEGSAPGTSESATPESGPGTSESATPESGPGSPAGSPTSTEEGTSESATPESGPGSEPATSGSETPGTSESATPESGPGTSTEPSEGSAPGTSTEPSEGSAPGTSTEPSEGSAPGTSTEPSEGSAPGTSTEPSEGSAPGTSTEPSEGSAPGSPAGSPTSTEEGTSTEPSEGSAPGTSESATPESGPGSEPATSGSETPGTSESATPESGPGSEPATSGSETPGTSESATPESGPGTSTEPSEGSAPGTSESATPESGPGSPAGSPTSTEEGSPAGSPTSTEEGSPAGSPTSTEEGTSESATPESGPGTSTEPSEGSAPGSLRRSSCFGGRMDRIGAQSGLGCNSFRYGGTSTEPSEGSAPGSEPATSGSETPGSPAGSPTSTEEGSTSSTAESPGPGTSTPESGSASPGSTSESPSGTAPGSTSESPSGTAPGTSTPESGSASPGTSTPESGSASPGSEPATSGSETPGTSESATPESGPGSPAGSPTSTEEGTSTEPSEGSAPGTSESATPESGPGTSTEPSEGSAPGTSTEPSEGSAPGSPAGSPTSTEEGTSTEPSEGSAPGTSTEPSEGSAPGTSESATPESGPGTSESATPESGPGTSTEPSEGSAPGTSTEPSEGSAPGTSESATPESGPGTSTEPSEGSAPGSEPATSGSETPGSPAGSPTSTEEGSSTPSGATGSPGTPGSGTASSSPGSSTPSGATGSPGTSTEPSEGSAPGTSTEPSEGSAPGSEPATSGSETPGSPAGSPTSTEEGSPAGSPTSTEEGTSTEPSEGSAPGASASGAPSTGGTSESATPESGPGSPAGSPTSTEEGSPAGSPTSTEEGSTSSTAESPGPGSTSESPSGTAPGTSPSGESSTAPGTPGSGTASSSPGSSTPSGATGSPGSSPSASTGTGPGSEPATSGSETPGTSESATPESGPGSEPATSGSETPGSTSSTAESPGPGSTSSTAESPGPGTSPSGESSTAPGSEPATSGSETPGSEPATSGSETPGTSTEPSEGSAPGSTSSTAESPGPGTSTPESGSASPGSTSESPSGTAPGTSTEPSEGSAPGTSTEPSEGSAPGTSTEPSEGSAPGSSTPSGATGSPGSSPSASTGTGPGASPGTSSTGSPGSEPATSGSETPGTSESATPESGPGSPAGSPTSTEEGSSTPSGATGSPGSSPSASTGTGPGASPGTSSTGSPGTSESATPESGPGTSTEPSEGSAPGTSTEPSEGSAP

SEQ ID NO: 2262 - protein, 1518 aa, Artificial Sequence
  Description of Artificial Sequence: Synthetic polypeptide
SPKMVQGSGGFGRKMDRISSSSGLGCKVLRRHGGSPAGSPTSTEEGTSESATPESGPGTSTEPSEGSAPGSPAGSPTSTEEGTSTEPSEGSAPGTSTEPSEGSAPGTSESATPESGPGSEPATSGSETPGSEPATSGSETPGSPAGSPTSTEEGTSESATPESGPGTSTEPSEGSAPGTSTEPSEGSAPGSPAGSPTSTEEGTSTEPSEGSAPGTSTEPSEGSAPGTSESATPESGPGTSTEPSEGSAPGTSESATPESGPGSEPATSGSETPGTSTEPSEGSAPGTSTEPSEGSAPGTSESATPESGPGTSESATPESGPGSPAGSPTSTEEGTSESATPESGPGSEPATSGSETPGTSESATPESGPGTSTEPSEGSAPGTSTEPSEGSAPGTSTEPSEGSAPGTSTEPSEGSAPGTSTEPSEGSAPGTSTEPSEGSAPGSPAGSPTSTEEGTSTEPSEGSAPGTSESATPESGPGSEPATSGSETPGTSESATPESGPGSEPATSGSETPGTSESATPESGPGTSTEPSEGSAPGTSESATPESGPGSPAGSPTSTEEGSPAGSPTSTEEGSPAGSPTSTEEGTSESATPESGPGTSTEPSEGSAPGTAPRSLRRSSCFGGRMDRIGAQSGLGCNSFRYGGTSTEPSEGSAPGSEPATSGSETPGSPAGSPTSTEEGSTSSTAESPGPGTSTPESGSASPGSTSESPSGTAPGSTSESPSGTAPGTSTPESGSASPGTSTPESGSASPGSEPATSGSETPGTSESATPESGPGSPAGSPTSTEEGTSTEPSEGSAPGTSESATPESGPGTSTEPSEGSAPGTSTEPSEGSAPGSPAGSPTSTEEGTSTEPSEGSAPGTSTEPSEGSAPGTSESATPESGPGTSESATPESGPGTSTEPSEGSAPGTSTEPSEGSAPGTSESATPESGPGTSTEPSEGSAPGSEPATSGSETPGSPAGSPTSTEEGSSTPSGATGSPGTPGSGTASSSPGSSTPSGATGSPGTSTEPSEGSAPGTSTEPSEGSAPGSEPATSGSETPGSPAGSPTSTEEGSPAGSPTSTEEGTSTEPSEGSAPGASASGAPSTGGTSESATPESGPGSPAGSPTSTEEGSPAGSPTSTEEGSTSSTAESPGPGSTSESPSGTAPGTSPSGESSTAPGTPGSGTASSSPGSSTPSGATGSPGSSPSASTGTGPGSEPATSGSETPGTSESATPESGPGSEPATSGSETPGSTSSTAESPGPGSTSSTAESPGPGTSPSGESSTAPGSEPATSGSETPGSEPATSGSETPGTSTEPSEGSAPGSTSSTAESPGPGTSTPESGSASPGSTSESPSGTAPGTSTEPSEGSAPGTSTEPSEGSAPGTSTEPSEGSAPGSSTPSGATGSPGSSPSASTGTGPGASPGTSSTGSPGSEPATSGSETPGTSESATPESGPGSPAGSPTSTEEGSSTPSGATGSPGSSPSASTGTGPGASPGTSSTGSPGTSESATPESGPGTSTEPSEGSAPGTSTEPSEGSAP

SEQ ID NO: 2263 - protein, 1527 aa, Artificial Sequence
  Description of Artificial Sequence: Synthetic polypeptide
SPKMVQGSGGFGRKMDRISSSSGLGCKVLRRHGGSPAGSPTSTEEGTSESATPESGPGTSTEPSEGSAPGSPAGSPTSTEEGTSTEPSEGSAPGTSTEPSEGSAPGTSESATPESGPGSEPATSGSETPGSEPATSGSETPGSPAGSPTSTEEGTSESATPESGPGTSTEPSEGSAPGTSTEPSEGSAPGSPAGSPTSTEEGTSTEPSEGSAPGTSTEPSEGSAPGTSESATPESGPGTSTEPSEGSAPGTSESATPESGPGSEPATSGSETPGTSTEPSEGSAPGTSTEPSEGSAPGTSESATPESGPGTSESATPESGPGSPAGSPTSTEEGTSESATPESGPGSEPATSGSETPGTSESATPESGPGTSTEPSEGSAPGTSTEPSEGSAPGTSTEPSEGSAPGTSTEPSEGSAPGTSTEPSEGSAPGTSTEPSEGSAPGSPAGSPTSTEEGTSTEPSEGSAPGTSESATPESGPGSEPATSGSETPGTSESATPESGPGSEPATSGSETPGTSESATPESGPGTSTEPSEGSAPGTSESATPESGPGSPAGSPTSTEEGSPAGSPTSTEEGSPAGSPTSTEEGTSESATPESGPGTSTEPSEGSAPGIVLSLDVPIGLLQILLEQARARAAREQATTNARILARVGHCGGTSTEPSEGSAPGSEPATSGSETPGSPAGSPTSTEEGSTSSTAESPGPGTSTPESGSASPGSTSESPSGTAPGSTSESPSGTAPGTSTPESGSASPGTSTPESGSASPGSEPATSGSETPGTSESATPESGPGSPAGSPTSTEEGTSTEPSEGSAPGTSESATPESGPGTSTEPSEGSAPGTSTEPSEGSAPGSPAGSPTSTEEGTSTEPSEGSAPGTSTEPSEGSAPGTSESATPESGPGTSESATPESGPGTSTEPSEGSAPGTSTEPSEGSAPGTSESATPESGPGTSTEPSEGSAPGSEPATSGSETPGSPAGSPTSTEEGSSTPSGATGSPGTPGSGTASSSPGSSTPSGATGSPGTSTEPSEGSAPGTSTEPSEGSAPGSEPATSGSETPGSPAGSPTSTEEGSPAGSPTSTEEGTSTEPSEGSAPGASASGAPSTGGTSESATPESGPGSPAGSPTSTEEGSPAGSPTSTEEGSTSSTAESPGPGSTSESPSGTAPGTSPSGESSTAPGTPGSGTASSSPGSSTPSGATGSPGSSPSASTGTGPGSEPATSGSETPGTSESATPESGPGSEPATSGSETPGSTSSTAESPGPGSTSSTAESPGPGTSPSGESSTAPGSEPATSGSETPGSEPATSGSETPGTSTEPSEGSAPGSTSSTAESPGPGTSTPESGSASPGSTSESPSGTAPGTSTEPSEGSAPGTSTEPSEGSAPGTSTEPSEGSAPGSSTPSGATGSPGSSPSASTGTGPGASPGTSSTGSPGSEPATSGSETPGTSESATPESGPGSPAGSPTSTEEGSSTPSGATGSPGSSPSASTGTGPGASPGTSSTGSPGTSESATPESGPGTSTEPSEGSAPGTSTEPSEGSAP

SEQ ID NO: 2264 - protein, 1524 aa, Artificial Sequence
  Description of Artificial Sequence: Synthetic polypeptide
SPKMVQGSGGFGRKMDRISSSSGLGCKVLRRHGGSPAGSPTSTEEGTSESATPESGPGTSTEPSEGSAPGSPAGSPTSTEEGTSTEPSEGSAPGTSTEPSEGSAPGTSESATPESGPGSEPATSGSETPGSEPATSGSETPGSPAGSPTSTEEGTSESATPESGPGTSTEPSEGSAPGTSTEPSEGSAPGSPAGSPTSTEEGTSTEPSEGSAPGTSTEPSEGSAPGTSESATPESGPGTSTEPSEGSAPGTSESATPESGPGSEPATSGSETPGTSTEPSEGSAPGTSTEPSEGSAPGTSESATPESGPGTSESATPESGPGSPAGSPTSTEEGTSESATPESGPGSEPATSGSETPGTSESATPESGPGTSTEPSEGSAPGTSTEPSEGSAPGTSTEPSEGSAPGTSTEPSEGSAPGTSTEPSEGSAPGTSTEPSEGSAPGSPAGSPTSTEEGTSTEPSEGSAPGTSESATPESGPGSEPATSGSETPGTSESATPESGPGSEPATSGSETPGTSESATPESGPGTSTEPSEGSAPGTSESATPESGPGSPAGSPTSTEEGSPAGSPTSTEEGSPAGSPTSTEEGTSESATPESGPGTSTEPSEGSAPGFTLSLDVPTNIMNLLFNIAKAKNLRAQAAANAHLMAQIGGTSTEPSEGSAPGSEPATSGSETPGSPAGSPTSTEEGSTSSTAESPGPGTSTPESGSASPGSTSESPSGTAPGSTSESPSGTAPGTSTPESGSASPGTSTPESGSASPGSEPATSGSETPGTSESATPESGPGSPAGSPTSTEEGTSTEPSEGSAPGTSESATPESGPGTSTEPSEGSAPGTSTEPSEGSAPGSPAGSPTSTEEGTSTEPSEGSAPGTSTEPSEGSAPGTSESATPESGPGTSESATPESGPGTSTEPSEGSAPGTSTEPSEGSAPGTSESATPESGPGTSTEPSEGSAPGSEPATSGSETPGSPAGSPTSTEEGSSTPSGATGSPGTPGSGTASSSPGSSTPSGATGSPGTSTEPSEGSAPGTSTEPSEGSAPGSEPATSGSETPGSPAGSPTSTEEGSPAGSPTSTEEGTSTEPSEGSAPGASASGAPSTGGTSESATPESGPGSPAGSPTSTEEGSPAGSPTSTEEGSTSSTAESPGPGSTSESPSGTAPGTSPSGESSTAPGTPGSGTASSSPGSSTPSGATGSPGSSPSASTGTGPGSEPATSGSETPGTSESATPESGPGSEPATSGSETPGSTSSTAESPGPGSTSSTAESPGPGTSPSGESSTAPGSEPATSGSETPGSEPATSGSETPGTSTEPSEGSAPGSTSSTAESPGPGTSTPESGSASPGSTSESPSGTAPGTSTEPSEGSAPGTSTEPSEGSAPGTSTEPSEGSAPGSSTPSGATGSPGSSPSASTGTGPGASPGTSSTGSPGSEPATSGSETPGTSESATPESGPGSPAGSPTSTEEGSSTPSGATGSPGSSPSASTGTGPGASPGTSSTGSPGTSESATPESGPGTSTEPSEGSAPGTSTEPSEGSAP

SEQ ID NO: 2265 - protein, 1518 aa, Artificial Sequence
  Description of Artificial Sequence: Synthetic polypeptide
TAPRSLRRSSCFGGRMDRIGAQSGLGCNSFRYGGSPAGSPTSTEEGTSESATPESGPGTSTEPSEGSAPGSPAGSPTSTEEGTSTEPSEGSAPGTSTEPSEGSAPGTSESATPESGPGSEPATSGSETPGSEPATSGSETPGSPAGSPTSTEEGTSESATPESGPGTSTEPSEGSAPGTSTEPSEGSAPGSPAGSPTSTEEGTSTEPSEGSAPGTSTEPSEGSAPGTSESATPESGPGTSTEPSEGSAPGTSESATPESGPGSEPATSGSETPGTSTEPSEGSAPGTSTEPSEGSAPGTSESATPESGPGTSESATPESGPGSPAGSPTSTEEGTSESATPESGPGSEPATSGSETPGTSESATPESGPGTSTEPSEGSAPGTSTEPSEGSAPGTSTEPSEGSAPGTSTEPSEGSAPGTSTEPSEGSAPGTSTEPSEGSAPGSPAGSPTSTEEGTSTEPSEGSAPGTSESATPESGPGSEPATSGSETPGTSESATPESGPGSEPATSGSETPGTSESATPESGPGTSTEPSEGSAPGTSESATPESGPGSPAGSPTSTEEGSPAGSPTSTEEGSPAGSPTSTEEGTSESATPESGPGTSTEPSEGSAPGSPKMVQGSGGFGRKMDRISSSSGLGCKVLRRHGGTSTEPSEGSAPGSEPATSGSETPGSPAGSPTSTEEGSTSSTAESPGPGTSTPESGSASPGSTSESPSGTAPGSTSESPSGTAPGTSTPESGSASPGTSTPESGSASPGSEPATSGSETPGTSESATPESGPGSPAGSPTSTEEGTSTEPSEGSAPGTSESATPESGPGTSTEPSEGSAPGTSTEPSEGSAPGSPAGSPTSTEEGTSTEPSEGSAPGTSTEPSEGSAPGTSESATPESGPGTSESATPESGPGTSTEPSEGSAPGTSTEPSEGSAPGTSESATPESGPGTSTEPSEGSAPGSEPATSGSETPGSPAGSPTSTEEGSSTPSGATGSPGTPGSGTASSSPGSSTPSGATGSPGTSTEPSEGSAPGTSTEPSEGSAPGSEPATSGSETPGSPAGSPTSTEEGSPAGSPTSTEEGTSTEPSEGSAPGASASGAPSTGGTSESATPESGPGSPAGSPTSTEEGSPAGSPTSTEEGSTSSTAESPGPGSTSESPSGTAPGTSPSGESSTAPGTPGSGTASSSPGSSTPSGATGSPGSSPSASTGTGPGSEPATSGSETPGTSESATPESGPGSEPATSGSETPGSTSSTAESPGPGSTSSTAESPGPGTSPSGESSTAPGSEPATSGSETPGSEPATSGSETPGTSTEPSEGSAPGSTSSTAESPGPGTSTPESGSASPGSTSESPSGTAPGTSTEPSEGSAPGTSTEPSEGSAPGTSTEPSEGSAPGSSTPSGATGSPGSSPSASTGTGPGASPGTSSTGSPGSEPATSGSETPGTSESATPESGPGSPAGSPTSTEEGSSTPSGATGSPGSSPSASTGTGPGASPGTSSTGSPGTSESATPESGPGTSTEPSEGSAPGTSTEPSEGSAP

SEQ ID NO: 2266 - protein, 1527 aa, Artificial Sequence
  Description of Artificial Sequence: Synthetic polypeptide
IVLSLDVPIGLLQILLEQARARAAREQATTNARILARVGHCGGSPAGSPTSTEEGTSESATPESGPGTSTEPSEGSAPGSPAGSPTSTEEGTSTEPSEGSAPGTSTEPSEGSAPGTSESATPESGPGSEPATSGSETPGSEPATSGSETPGSPAGSPTSTEEGTSESATPESGPGTSTEPSEGSAPGTSTEPSEGSAPGSPAGSPTSTEEGTSTEPSEGSAPGTSTEPSEGSAPGTSESATPESGPGTSTEPSEGSAPGTSESATPESGPGSEPATSGSETPGTSTEPSEGSAPGTSTEPSEGSAPGTSESATPESGPGTSESATPESGPGSPAGSPTSTEEGTSESATPESGPGSEPATSGSETPGTSESATPESGPGTSTEPSEGSAPGTSTEPSEGSAPGTSTEPSEGSAPGTSTEPSEGSAPGTSTEPSEGSAPGTSTEPSEGSAPGSPAGSPTSTEEGTSTEPSEGSAPGTSESATPESGPGSEPATSGSETPGTSESATPESGPGSEPATSGSETPGTSESATPESGPGTSTEPSEGSAPGTSESATPESGPGSPAGSPTSTEEGSPAGSPTSTEEGSPAGSPTSTEEGTSESATPESGPGTSTEPSEGSAPGSPKMVQGSGGFGRKMDRISSSSGLGCKVLRRHGGTSTEPSEGSAPGSEPATSGSETPGSPAGSPTSTEEGSTSSTAESPGPGTSTPESGSASPGSTSESPSGTAPGSTSESPSGTAPGTSTPESGSASPGTSTPESGSASPGSEPATSGSETPGTSESATPESGPGSPAGSPTSTEEGTSTEPSEGSAPGTSESATPESGPGTSTEPSEGSAPGTSTEPSEGSAPGSPAGSPTSTEEGTSTEPSEGSAPGTSTEPSEGSAPGTSESATPESGPGTSESATPESGPGTSTEPSEGSAPGTSTEPSEGSAPGTSESATPESGPGTSTEPSEGSAPGSEPATSGSETPGSPAGSPTSTEEGSSTPSGATGSPGTPGSGTASSSPGSSTPSGATGSPGTSTEPSEGSAPGTSTEPSEGSAPGSEPATSGSETPGSPAGSPTSTEEGSPAGSPTSTEEGTSTEPSEGSAPGASASGAPSTGGTSESATPESGPGSPAGSPTSTEEGSPAGSPTSTEEGSTSSTAESPGPGSTSESPSGTAPGTSPSGESSTAPGTPGSGTASSSPGSSTPSGATGSPGSSPSASTGTGPGSEPATSGSETPGTSESATPESGPGSEPATSGSETPGSTSSTAESPGPGSTSSTAESPGPGTSPSGESSTAPGSEPATSGSETPGSEPATSGSETPGTSTEPSEGSAPGSTSSTAESPGPGTSTPESGSASPGSTSESPSGTAPGTSTEPSEGSAPGTSTEPSEGSAPGTSTEPSEGSAPGSSTPSGATGSPGSSPSASTGTGPGASPGTSSTGSPGSEPATSGSETPGTSESATPESGPGSPAGSPTSTEEGSSTPSGATGSPGSSPSASTGTGPGASPGTSSTGSPGTSESATPESGPGTSTEPSEGSAPGTSTEPSEGSAP

SEQ ID NO: 2267 - protein, 1524 aa, Artificial Sequence
  Description of Artificial Sequence: Synthetic polypeptide
FTLSLDVPTNIMNLLFNIAKAKNLRAQAAANAHLMAQIGGSPAGSPTSTEEGTSESATPESGPGTSTEPSEGSAPGSPAGSPTSTEEGTSTEPSEGSAPGTSTEPSEGSAPGTSESATPESGPGSEPATSGSETPGSEPATSGSETPGSPAGSPTSTEEGTSESATPESGPGTSTEPSEGSAPGTSTEPSEGSAPGSPAGSPTSTEEGTSTEPSEGSAPGTSTEPSEGSAPGTSESATPESGPGTSTEPSEGSAPGTSESATPESGPGSEPATSGSETPGTSTEPSEGSAPGTSTEPSEGSAPGTSESATPESGPGTSESATPESGPGSPAGSPTSTEEGTSESATPESGPGSEPATSGSETPGTSESATPESGPGTSTEPSEGSAPGTSTEPSEGSAPGTSTEPSEGSAPGTSTEPSEGSAPGTSTEPSEGSAPGTSTEPSEGSAPGSPAGSPTSTEEGTSTEPSEGSAPGTSESATPESGPGSEPATSGSETPGTSESATPESGPGSEPATSGSETPGTSESATPESGPGTSTEPSEGSAPGTSESATPESGPGSPAGSPTSTEEGSPAGSPTSTEEGSPAGSPTSTEEGTSESATPESGPGTSTEPSEGSAPGSPKMVQGSGGFGRKMDRISSSSGLGCKVLRRHGGTSTEPSEGSAPGSEPATSGSETPGSPAGSPTSTEEGSTSSTAESPGPGTSTPESGSASPGSTSESPSGTAPGSTSESPSGTAPGTSTPESGSASPGTSTPESGSASPGSEPATSGSETPGTSESATPESGPGSPAGSPTSTEEGTSTEPSEGSAPGTSESATPESGPGTSTEPSEGSAPGTSTEPSEGSAPGSPAGSPTSTEEGTSTEPSEGSAPGTSTEPSEGSAPGTSESATPESGPGTSESATPESGPGTSTEPSEGSAPGTSTEPSEGSAPGTSESATPESGPGTSTEPSEGSAPGSEPATSGSETPGSPAGSPTSTEEGSSTPSGATGSPGTPGSGTASSSPGSSTPSGATGSPGTSTEPSEGSAPGTSTEPSEGSAPGSEPATSGSETPGSPAGSPTSTEEGSPAGSPTSTEEGTSTEPSEGSAPGASASGAPSTGGTSESATPESGPGSPAGSPTSTEEGSPAGSPTSTEEGSTSSTAESPGPGSTSESPSGTAPGTSPSGESSTAPGTPGSGTASSSPGSSTPSGATGSPGSSPSASTGTGPGSEPATSGSETPGTSESATPESGPGSEPATSGSETPGSTSSTAESPGPGSTSSTAESPGPGTSPSGESSTAPGSEPATSGSETPGSEPATSGSETPGTSTEPSEGSAPGSTSSTAESPGPGTSTPESGSASPGSTSESPSGTAPGTSTEPSEGSAPGTSTEPSEGSAPGTSTEPSEGSAPGSSTPSGATGSPGSSPSASTGTGPGASPGTSSTGSPGSEPATSGSETPGTSESATPESGPGSPAGSPTSTEEGSSTPSGATGSPGSSPSASTGTGPGASPGTSSTGSPGTSESATPESGPGTSTEPSEGSAPGTSTEPSEGSAP

SEQ ID NO: 2268 - protein, 1527 aa, Artificial Sequence
  Description of Artificial Sequence: Synthetic polypeptide
TAPRSLRRSSCFGGRMDRIGAQSGLGCNSFRYGGSPAGSPTSTEEGTSESATPESGPGTSTEPSEGSAPGSPAGSPTSTEEGTSTEPSEGSAPGTSTEPSEGSAPGTSESATPESGPGSEPATSGSETPGSEPATSGSETPGSPAGSPTSTEEGTSESATPESGPGTSTEPSEGSAPGTSTEPSEGSAPGSPAGSPTSTEEGTSTEPSEGSAPGTSTEPSEGSAPGTSESATPESGPGTSTEPSEGSAPGTSESATPESGPGSEPATSGSETPGTSTEPSEGSAPGTSTEPSEGSAPGTSESATPESGPGTSESATPESGPGSPAGSPTSTEEGTSESATPESGPGSEPATSGSETPGTSESATPESGPGTSTEPSEGSAPGTSTEPSEGSAPGTSTEPSEGSAPGTSTEPSEGSAPGTSTEPSEGSAPGTSTEPSEGSAPGSPAGSPTSTEEGTSTEPSEGSAPGTSESATPESGPGSEPATSGSETPGTSESATPESGPGSEPATSGSETPGTSESATPESGPGTSTEPSEGSAPGTSESATPESGPGSPAGSPTSTEEGSPAGSPTSTEEGSPAGSPTSTEEGTSESATPESGPGTSTEPSEGSAPGIVLSLDVPIGLLQILLEQARARAAREQATTNARILARVGHCGGTSTEPSEGSAPGSEPATSGSETPGSPAGSPTSTEEGSTSSTAESPGPGTSTPESGSASPGSTSESPSGTAPGSTSESPSGTAPGTSTPESGSASPGTSTPESGSASPGSEPATSGSETPGTSESATPESGPGSPAGSPTSTEEGTSTEPSEGSAPGTSESATPESGPGTSTEPSEGSAPGTSTEPSEGSAPGSPAGSPTSTEEGTSTEPSEGSAPGTSTEPSEGSAPGTSESATPESGPGTSESATPESGPGTSTEPSEGSAPGTSTEPSEGSAPGTSESATPESGPGTSTEPSEGSAPGSEPATSGSETPGSPAGSPTSTEEGSSTPSGATGSPGTPGSGTASSSPGSSTPSGATGSPGTSTEPSEGSAPGTSTEPSEGSAPGSEPATSGSETPGSPAGSPTSTEEGSPAGSPTSTEEGTSTEPSEGSAPGASASGAPSTGGTSESATPESGPGSPAGSPTSTEEGSPAGSPTSTEEGSTSSTAESPGPGSTSESPSGTAPGTSPSGESSTAPGTPGSGTASSSPGSSTPSGATGSPGSSPSASTGTGPGSEPATSGSETPGTSESATPESGPGSEPATSGSETPGSTSSTAESPGPGSTSSTAESPGPGTSPSGESSTAPGSEPATSGSETPGSEPATSGSETPGTSTEPSEGSAPGSTSSTAESPGPGTSTPESGSASPGSTSESPSGTAPGTSTEPSEGSAPGTSTEPSEGSAPGTSTEPSEGSAPGSSTPSGATGSPGSSPSASTGTGPGASPGTSSTGSPGSEPATSGSETPGTSESATPESGPGSPAGSPTSTEEGSSTPSGATGSPGSSPSASTGTGPGASPGTSSTGSPGTSESATPESGPGTSTEPSEGSAPGTSTEPSEGSAP

SEQ ID NO: 2269 - protein, 1524 aa, Artificial Sequence
  Description of Artificial Sequence: Synthetic polypeptide
TAPRSLRRSSCFGGRMDRIGAQSGLGCNSFRYGGSPAGSPTSTEEGTSESATPESGPGTSTEPSEGSAPGSPAGSPTSTEEGTSTEPSEGSAPGTSTEPSEGSAPGTSESATPESGPGSEPATSGSETPGSEPATSGSETPGSPAGSPTSTEEGTSESATPESGPGTSTEPSEGSAPGTSTEPSEGSAPGSPAGSPTSTEEGTSTEPSEGSAPGTSTEPSEGSAPGTSESATPESGPGTSTEPSEGSAPGTSESATPESGPGSEPATSGSETPGTSTEPSEGSAPGTSTEPSEGSAPGTSESATPESGPGTSESATPESGPGSPAGSPTSTEEGTSESATPESGPGSEPATSGSETPGTSESATPESGPGTSTEPSEGSAPGTSTEPSEGSAPGTSTEPSEGSAPGTSTEPSEGSAPGTSTEPSEGSAPGTSTEPSEGSAPGSPAGSPTSTEEGTSTEPSEGSAPGTSESATPESGPGSEPATSGSETPGTSESATPESGPGSEPATSGSETPGTSESATPESGPGTSTEPSEGSAPGTSESATPESGPGSPAGSPTSTEEGSPAGSPTSTEEGSPAGSPTSTEEGTSESATPESGPGTSTEPSEGSAPGFTLSLDVPTNIMNLLFNIAKAKNLRAQAAANAHLMAQIGGTSTEPSEGSAPGSEPATSGSETPGSPAGSPTSTEEGSTSSTAESPGPGTSTPESGSASPGSTSESPSGTAPGSTSESPSGTAPGTSTPESGSASPGTSTPESGSASPGSEPATSGSETPGTSESATPESGPGSPAGSPTSTEEGTSTEPSEGSAPGTSESATPESGPGTSTEPSEGSAPGTSTEPSEGSAPGSPAGSPTSTEEGTSTEPSEGSAPGTSTEPSEGSAPGTSESATPESGPGTSESATPESGPGTSTEPSEGSAPGTSTEPSEGSAPGTSESATPESGPGTSTEPSEGSAPGSEPATSGSETPGSPAGSPTSTEEGSSTPSGATGSPGTPGSGTASSSPGSSTPSGATGSPGTSTEPSEGSAPGTSTEPSEGSAPGSEPATSGSETPGSPAGSPTSTEEGSPAGSPTSTEEGTSTEPSEGSAPGASASGAPSTGGTSESATPESGPGSPAGSPTSTEEGSPAGSPTSTEEGSTSSTAESPGPGSTSESPSGTAPGTSPSGESSTAPGTPGSGTASSSPGSSTPSGATGSPGSSPSASTGTGPGSEPATSGSETPGTSESATPESGPGSEPATSGSETPGSTSSTAESPGPGSTSSTAESPGPGTSPSGESSTAPGSEPATSGSETPGSEPATSGSETPGTSTEPSEGSAPGSTSSTAESPGPGTSTPESGSASPGSTSESPSGTAPGTSTEPSEGSAPGTSTEPSEGSAPGTSTEPSEGSAPGSSTPSGATGSPGSSPSASTGTGPGASPGTSSTGSPGSEPATSGSETPGTSESATPESGPGSPAGSPTSTEEGSSTPSGATGSPGSSPSASTGTGPGASPGTSSTGSPGTSESATPESGPGTSTEPSEGSAPGTSTEPSEGSAP

SEQ ID NO: 2270 - protein, 1527 aa, Artificial Sequence
  Description of Artificial Sequence: Synthetic polypeptide
IVLSLDVPIGLLQILLEQARARAAREQATTNARILARVGHCGGSPAGSPTSTEEGTSESATPESGPGTSTEPSEGSAPGSPAGSPTSTEEGTSTEPSEGSAPGTSTEPSEGSAPGTSESATPESGPGSEPATSGSETPGSEPATSGSETPGSPAGSPTSTEEGTSESATPESGPGTSTEPSEGSAPGTSTEPSEGSAPGSPAGSPTSTEEGTSTEPSEGSAPGTSTEPSEGSAPGTSESATPESGPGTSTEPSEGSAPGTSESATPESGPGSEPATSGSETPGTSTEPSEGSAPGTSTEPSEGSAPGTSESATPESGPGTSESATPESGPGSPAGSPTSTEEGTSESATPESGPGSEPATSGSETPGTSESATPESGPGTSTEPSEGSAPGTSTEPSEGSAPGTSTEPSEGSAPGTSTEPSEGSAPGTSTEPSEGSAPGTSTEPSEGSAPGSPAGSPTSTEEGTSTEPSEGSAPGTSESATPESGPGSEPATSGSETPGTSESATPESGPGSEPATSGSETPGTSESATPESGPGTSTEPSEGSAPGTSESATPESGPGSPAGSPTSTEEGSPAGSPTSTEEGSPAGSPTSTEEGTSESATPESGPGTSTEPSEGSAPGTAPRSLRRSSCFGGRMDRIGAQSGLGCNSFRYGGTSTEPSEGSAPGSEPATSGSETPGSPAGSPTSTEEGSTSSTAESPGPGTSTPESGSASPGSTSESPSGTAPGSTSESPSGTAPGTSTPESGSASPGTSTPESGSASPGSEPATSGSETPGTSESATPESGPGSPAGSPTSTEEGTSTEPSEGSAPGTSESATPESGPGTSTEPSEGSAPGTSTEPSEGSAPGSPAGSPTSTEEGTSTEPSEGSAPGTSTEPSEGSAPGTSESATPESGPGTSESATPESGPGTSTEPSEGSAPGTSTEPSEGSAPGTSESATPESGPGTSTEPSEGSAPGSEPATSGSETPGSPAGSPTSTEEGSSTPSGATGSPGTPGSGTASSSPGSSTPSGATGSPGTSTEPSEGSAPGTSTEPSEGSAPGSEPATSGSETPGSPAGSPTSTEEGSPAGSPTSTEEGTSTEPSEGSAPGASASGAPSTGGTSESATPESGPGSPAGSPTSTEEGSPAGSPTSTEEGSTSSTAESPGPGSTSESPSGTAPGTSPSGESSTAPGTPGSGTASSSPGSSTPSGATGSPGSSPSASTGTGPGSEPATSGSETPGTSESATPESGPGSEPATSGSETPGSTSSTAESPGPGSTSSTAESPGPGTSPSGESSTAPGSEPATSGSETPGSEPATSGSETPGTSTEPSEGSAPGSTSSTAESPGPGTSTPESGSASPGSTSESPSGTAPGTSTEPSEGSAPGTSTEPSEGSAPGTSTEPSEGSAPGSSTPSGATGSPGSSPSASTGTGPGASPGTSSTGSPGSEPATSGSETPGTSESATPESGPGSPAGSPTSTEEGSSTPSGATGSPGSSPSASTGTGPGASPGTSSTGSPGTSESATPESGPGTSTEPSEGSAPGTSTEPSEGSAP

SEQ ID NO: 2271 - protein, 1524 aa, Artificial Sequence
  Description of Artificial Sequence: Synthetic polypeptide
FTLSLDVPTNIMNLLFNIAKAKNLRAQAAANAHLMAQIGGSPAGSPTSTEEGTSESATPESGPGTSTEPSEGSAPGSPAGSPTSTEEGTSTEPSEGSAPGTSTEPSEGSAPGTSESATPESGPGSEPATSGSETPGSEPATSGSETPGSPAGSPTSTEEGTSESATPESGPGTSTEPSEGSAPGTSTEPSEGSAPGSPAGSPTSTEEGTSTEPSEGSAPGTSTEPSEGSAPGTSESATPESGPGTSTEPSEGSAPGTSESATPESGPGSEPATSGSETPGTSTEPSEGSAPGTSTEPSEGSAPGTSESATPESGPGTSESATPESGPGSPAGSPTSTEEGTSESATPESGPGSEPATSGSETPGTSESATPESGPGTSTEPSEGSAPGTSTEPSEGSAPGTSTEPSEGSAPGTSTEPSEGSAPGTSTEPSEGSAPGTSTEPSEGSAPGSPAGSPTSTEEGTSTEPSEGSAPGTSESATPESGPGSEPATSGSETPGTSESATPESGPGSEPATSGSETPGTSESATPESGPGTSTEPSEGSAPGTSESATPESGPGSPAGSPTSTEEGSPAGSPTSTEEGSPAGSPTSTEEGTSESATPESGPGTSTEPSEGSAPGTAPRSLRRSSCFGGRMDRIGAQSGLGCNSFRYGGTSTEPSEGSAPGSEPATSGSETPGSPAGSPTSTEEGSTSSTAESPGPGTSTPESGSASPGSTSESPSGTAPGSTSESPSGTAPGTSTPESGSASPGTSTPESGSASPGSEPATSGSETPGTSESATPESGPGSPAGSPTSTEEGTSTEPSEGSAPGTSESATPESGPGTSTEPSEGSAPGTSTEPSEGSAPGSPAGSPTSTEEGTSTEPSEGSAPGTSTEPSEGSAPGTSESATPESGPGTSESATPESGPGTSTEPSEGSAPGTSTEPSEGSAPGTSESATPESGPGTSTEPSEGSAPGSEPATSGSETPGSPAGSPTSTEEGSSTPSGATGSPGTPGSGTASSSPGSSTPSGATGSPGTSTEPSEGSAPGTSTEPSEGSAPGSEPATSGSETPGSPAGSPTSTEEGSPAGSPTSTEEGTSTEPSEGSAPGASASGAPSTGGTSESATPESGPGSPAGSPTSTEEGSPAGSPTSTEEGSTSSTAESPGPGSTSESPSGTAPGTSPSGESSTAPGTPGSGTASSSPGSSTPSGATGSPGSSPSASTGTGPGSEPATSGSETPGTSESATPESGPGSEPATSGSETPGSTSSTAESPGPGSTSSTAESPGPGTSPSGESSTAPGSEPATSGSETPGSEPATSGSETPGTSTEPSEGSAPGSTSSTAESPGPGTSTPESGSASPGSTSESPSGTAPGTSTEPSEGSAPGTSTEPSEGSAPGTSTEPSEGSAPGSSTPSGATGSPGSSPSASTGTGPGASPGTSSTGSPGSEPATSGSETPGTSESATPESGPGSPAGSPTSTEEGSSTPSGATGSPGSSPSASTGTGPGASPGTSSTGSPGTSESATPESGPGTSTEPSEGSAPGTSTEPSEGSAP

SEQ ID NO: 2272 - protein, 960 aa, Artificial Sequence
  Description of Artificial Sequence: Synthetic polypeptide
HGEGTFTSDLSKQMEEEAVRLFIEWLKNGGPSSGAPPPSGSPGGTSTEPSEGSAPGSEPATSGSETPGSPAGSPTSTEEGSTSSTAESPGPGTSTPESGSASPGSTSESPSGTAPGSTSESPSGTAPGTSTPESGSASPGTSTPESGSASPGSEPATSGSETPGTSESATPESGPGSPAGSPTSTEEGTSTEPSEGSAPGTSESATPESGPGTSTEPSEGSAPGTSTEPSEGSAPGSPAGSPTSTEEGTSTEPSEGSAPGTSTEPSEGSAPGTSESATPESGPGTSESATPESGPGTSTEPSEGSAPGTSTEPSEGSAPGTSESATPESGPGTSTEPSEGSAPGSEPATSGSETPGSPAGSPTSTEEGSSTPSGATGSPGTPGSGTASSSPGSSTPSGATGSPGTSTEPSEGSAPGTSTEPSEGSAPGSEPATSGSETPGSPAGSPTSTEEGSPAGSPTSTEEGTSTEPSEGSAPGASASGAPSTGGTSESATPESGPGSPAGSPTSTEEGSPAGSPTSTEEGSTSSTAESPGPGSTSESPSGTAPGTSPSGESSTAPGTPGSGTASSSPGSSTPSGATGSPGSSPSASTGTGPGSEPATSGSETPGTSESATPESGPGSEPATSGSETPGSTSSTAESPGPGSTSSTAESPGPGTSPSGESSTAPGSEPATSGSETPGSEPATSGSETPGTSTEPSEGSAPGSTSSTAESPGPGTSTPESGSASPGSTSESPSGTAPGTSTEPSEGSAPGTSTEPSEGSAPGTSTEPSEGSAPGSSTPSGATGSPGSSPSASTGTGPGASPGTSSTGSPGSEPATSGSETPGTSESATPESGPGSPAGSPTSTEEGSSTPSGATGSPGSSPSASTGTGPGASPGTSSTGSPGTSESATPESGPGTSTEPSEGSAPGTSTEPSEGSAPGLTPRSLLVGGGTHSQGTFTSDYSKYLDSRRAQDFVQWLMNT

SEQ ID NO: 2273 - protein, 783 aa, Artificial Sequence
  Description of Artificial Sequence: Synthetic polypeptide
KCNTATCATQRLANFLVHSSNNFGAILSSTNVGSNTYGSPGKLTRVVGGGGSPAGSPTSTEEGTSESATPESGPGTSTEPSEGSAPGSPAGSPTSTEEGTSTEPSEGSAPGTSTEPSEGSAPGTSESATPESGPGSEPATSGSETPGSEPATSGSETPGSPAGSPTSTEEGTSESATPESGPGTSTEPSEGSAPGTSTEPSEGSAPGSPAGSPTSTEEGTSTEPSEGSAPGTSTEPSEGSAPGTSESATPESGPGTSTEPSEGSAPGTSESATPESGPGSEPATSGSETPGTSTEPSEGSAPGTSTEPSEGSAPGTSESATPESGPGTSESATPESGPGSPAGSPTSTEEGTSESATPESGPGSEPATSGSETPGTSESATPESGPGTSTEPSEGSAPGTSTEPSEGSAPGTSTEPSEGSAPGTSTEPSEGSAPGTSTEPSEGSAPGTSTEPSEGSAPGSPAGSPTSTEEGTSTEPSEGSAPGTSESATPESGPGSEPATSGSETPGTSESATPESGPGSEPATSGSETPGTSESATPESGPGTSTEPSEGSAPGTSESATPESGPGSPAGSPTSTEEGSPAGSPTSTEEGSPAGSPTSTEEGTSESATPESGPGTSTEPSEGSAPGLTPRSLLVGTVPIQKVQDDTKTLIKTIVTRINDISHTQSVSSKQKVTGLDFIPGLHPILTLSKMDQTLAVYQQILTSMPSRNVIQISNDLENLRDLLHVLAFSKSCHLPWASGLETLDSLGGVLEASGYSTEVVALSRLQGSLQDMLWQLDLSPGC

SEQ ID NO: 2274 - protein, 958 aa, Artificial Sequence
  Description of Artificial Sequence: Synthetic polypeptide
TQAQLLRVGCVLGTCQVQNLSHRLWQLMGPAGRQDSAPVDPSSPHSYGGGLGPVSGVPGGSPAGSPTSTEEGTSESATPESGPGTSTEPSEGSAPGSPAGSPTSTEEGTSTEPSEGSAPGTSTEPSEGSAPGTSESATPESGPGSEPATSGSETPGSEPATSGSETPGSPAGSPTSTEEGTSESATPESGPGTSTEPSEGSAPGTSTEPSEGSAPGSPAGSPTSTEEGTSTEPSEGSAPGTSTEPSEGSAPGTSESATPESGPGTSTEPSEGSAPGTSESATPESGPGSEPATSGSETPGTSTEPSEGSAPGTSTEPSEGSAPGTSESATPESGPGTSESATPESGPGSPAGSPTSTEEGTSESATPESGPGSEPATSGSETPGTSESATPESGPGTSTEPSEGSAPGTSTEPSEGSAPGTSTEPSEGSAPGTSTEPSEGSAPGTSTEPSEGSAPGTSTEPSEGSAPGSPAGSPTSTEEGTSTEPSEGSAPGTSESATPESGPGSEPATSGSETPGTSESATPESGPGSEPATSGSETPGTSESATPESGPGTSTEPSEGSAPGTSESATPESGPGSPAGSPTSTEEGSPAGSPTSTEEGSPAGSPTSTEEGTSESATPESGPGTSTEPSEGSAPGTSESATPESGPGSEPATSGSETPGTSESATPESGPGSEPATSGSETPGTSESATPESGPGTSTEPSEGSAPGSPAGSPTSTEEGTSESATPESGPGSEPATSGSETPGTSESATPESGPGSPAGSPTSTEEGSPAGSPTSTEEGTSTEPSEGSAPGTSESATPESGPGTSESATPESGPGTSESATPESGPGSEPATSGSETPGSEPATSGSETPGSPAGSPTSTEEGTSTEPSEGSAPGTSTEPSEGSAPGSEPATSGSETPGTSESATPESGPGTSTEPSEGSAPGQLGPQGPPHLVADPSKKQGPWLEEEEEAYGWMDF

SEQ ID NO: 2275 - protein, 1386 aa, Artificial Sequence
  Description of Artificial Sequence: Synthetic polypeptide
HAEGTFTSDVSSYLEGQAALEFIAWLVKGRGGTSTEPSEGSAPGSEPATSGSETPGSPAGSPTSTEEGSTSSTAESPGPGTSTPESGSASPGSTSESPSGTAPGSTSESPSGTAPGTSTPESGSASPGTSTPESGSASPGSEPATSGSETPGTSESATPESGPGSPAGSPTSTEEGTSTEPSEGSAPGTSESATPESGPGTSTEPSEGSAPGTSTEPSEGSAPGSPAGSPTSTEEGTSTEPSEGSAPGTSTEPSEGSAPGTSESATPESGPGTSESATPESGPGTSTEPSEGSAPGTSTEPSEGSAPGTSESATPESGPGTSTEPSEGSAPGSEPATSGSETPGSPAGSPTSTEEGSSTPSGATGSPGTPGSGTASSSPGSSTPSGATGSPGTSTEPSEGSAPGTSTEPSEGSAPGSEPATSGSETPGSPAGSPTSTEEGSPAGSPTSTEEGTSTEPSEGSAPGPEPTGPAPSGGSEPATSGSETPGTSESATPESGPGSPAGSPTSTEEGTSESATPESGPGSPAGSPTSTEEGSPAGSPTSTEEGTSESATPESGPGSPAGSPTSTEEGSPAGSPTSTEEGSTSSTAESPGPGSTSESPSGTAPGTSPSGESSTAPGSTSESPSGTAPGSTSESPSGTAPGTSPSGESSTAPGTSTEPSEGSAPGTSESATPESGPGTSESATPESGPGSEPATSGSETPGTSESATPESGPGTSESATPESGPGTSTEPSEGSAPGTSESATPESGPGTSTEPSEGSAPGTSPSGESSTAPGTSPSGESSTAPGTSPSGESSTAPGTSTEPSEGSAPGSPAGSPTSTEEGTSTEPSEGSAPGSSPSASTGTGPGSSTPSGATGSPGSSTPSGATGSPGSSTPSGATGSPGSSTPSGATGSPGASPGTSSTGSPGASASGAPSTGGTSPSGESSTAPGSTSSTAESPGPGTSPSGESSTAPGTSESATPESGPGTSTEPSEGSAPGTSTEPSEGSAPGSSPSASTGTGPGSSTPSGATGSPGASPGTSSTGSPGTSTPESGSASPGTSPSGESSTAPGTSPSGESSTAPGTSESATPESGPGSEPATSGSETPGTSTEPSEGSAPGSTSESPSGTAPGSTSESPSGTAPGTSTPESGSASPGSPAGSPTSTEEGTSESATPESGPGTSTEPSEGSAPGSPAGSPTSTEEGTSESATPESGPGSEPATSGSETPGSSTPSGATGSPGASPGTSSTGSPGSSTPSGATGSPGSTSESPSGTAPGTSPSGESSTAPGSTSSTAESPGPGSSTPSGATGSPGASPGTSSTGSPGTPGSGTASSSPGSPAGSPTSTEEGSPAGSPTSTEEGTSTEPSEGSAPGAPLGLRLRGGGFRVDEEFQSPFASQSRGYFLFRPRN

SEQ ID NO: 2276 - protein, 31 aa, Artificial Sequence
  Description of Artificial Sequence: Synthetic polypeptide
HAEGTFTSDVSSYLEGQAAREFIAWLVKGRG

SEQ ID NO: 2277 - protein, 31 aa, Artificial Sequence
  Description of Artificial Sequence: Synthetic polypeptide
HAEGTFTSDVSSYLEGQAAKEFIAWLVRGRG

SEQ ID NO: 2278 - protein, 31 aa, Artificial Sequence
  Description of Artificial Sequence: Synthetic polypeptide
HAEGTFTSDVSSYLEGQAAKEFIAWLVKGKG

SEQ ID NO: 2279 - protein, 31 aa, Artificial Sequence
  Description of Artificial Sequence: Synthetic polypeptide
HAEGTFTSDVSSYLEGQAAREFIAWLVRGKG

SEQ ID NO: 2280 - protein, 32 aa, Artificial Sequence
  Description of Artificial Sequence: Synthetic polypeptide
HAEGTFTSDVSSYLEGQAAREFIAWLVRGKGR

SEQ ID NO: 2281 - protein, 33 aa, Artificial Sequence
  Description of Artificial Sequence: Synthetic polypeptide
HAEGTFTSDVSSYLEGQAAREFIAWLVRGRGRK

SEQ ID NO: 2282 - protein, 34 aa, Artificial Sequence
  Description of Artificial Sequence: Synthetic polypeptide
HAEGTFTSDVSSYLEGQAAREFIAWLVRGRGRRK

SEQ ID NO: 2283 - protein, 31 aa, Artificial Sequence
  Description of Artificial Sequence: Synthetic polypeptide
HAEGTFTSDVSSYLEGQAAREFIAWLVKGKG

SEQ ID NO: 2284 - protein, 31 aa, Artificial Sequence
  Description of Artificial Sequence: Synthetic polypeptide
HAEGTFTSDVSSYLEGQAAKEFIAWLVRGKG

SEQ ID NO: 2285 - protein, 33 aa, Artificial Sequence
  Description of Artificial Sequence: Synthetic polypeptide
HAEGTFTSDVSSYLEGQAAREFIAWLVKGRGRK

SEQ ID NO: 2286 - protein, 34 aa, Artificial Sequence
  Description of Artificial Sequence: Synthetic polypeptide
HAEGTFTSDVSSYLEGQAAKEFIAWLVRGRGRRK

SEQ ID NO: 2287 - protein, 33 aa, Artificial Sequence
  Description of Artificial Sequence: Synthetic polypeptide
HAEGTFTSDVSSYLEGQAAREFIAWLVRGKGRK

SEQ ID NO: 2288 - protein, 34 aa, Artificial Sequence
  Description of Artificial Sequence: Synthetic polypeptide
HAEGTFTSDVSSYLEGQAAREFIAWLVRGKGRRK

SEQ ID NO: 2289 - protein, 31 aa, Artificial Sequence
  Description of Artificial Sequence: Synthetic polypeptide
HGEGTFTSDVSSYLEGQAAREFIAWLVKGRG

SEQ ID NO: 2290 - protein, 31 aa, Artificial Sequence
  Description of Artificial Sequence: Synthetic polypeptide
HGEGTFTSDVSSYLEGQAAKEFIAWLVRGRG

SEQ ID NO: 2291 - protein, 31 aa, Artificial Sequence
  Description of Artificial Sequence: Synthetic polypeptide
HGEGTFTSDVSSYLEGQAAKEFIAWLVKGKG

SEQ ID NO: 2292 - protein, 31 aa, Artificial Sequence
  Description of Artificial Sequence: Synthetic polypeptide
HGEGTFTSDVSSYLEGQAAREFIAWLVRGKG

SEQ ID NO: 2293 - protein, 33 aa, Artificial Sequence
  Description of Artificial Sequence: Synthetic polypeptide
HGEGTFTSDVSSYLEGQAAREFIAWLVRGRGRK

SEQ ID NO: 2294 - protein, 34 aa, Artificial Sequence
  Description of Artificial Sequence: Synthetic polypeptide
HGEGTFTSDVSSYLEGQAAREFIAWLVRGRGRRK

SEQ ID NO: 2295 - protein, 31 aa, Artificial Sequence
  Description of Artificial Sequence: Synthetic polypeptide
HGEGTFTSDVSSYLEGQAAREFIAWLVKGKG

SEQ ID NO: 2296 - protein, 31 aa, Artificial Sequence
  Description of Artificial Sequence: Synthetic polypeptide
HGEGTFTSDVSSYLEGQAAKEFIAWLVRGKG

SEQ ID NO: 2297 - protein, 33 aa, Artificial Sequence
  Description of Artificial Sequence: Synthetic polypeptide
HGEGTFTSDVSSYLEGQAAREFIAWLVKGRGRK

SEQ ID NO: 2298 - protein, 34 aa, Artificial Sequence
  Description of Artificial Sequence: Synthetic polypeptide
HGEGTFTSDVSSYLEGQAAKEFIAWLVRGRGRRK

SEQ ID NO: 2299 - protein, 33 aa, Artificial Sequence
  Description of Artificial Sequence: Synthetic polypeptide
HGEGTFTSDVSSYLEGQAAREFIAWLVRGKGRK

SEQ ID NO: 2300 - protein, 34 aa, Artificial Sequence
  Description of Artificial Sequence: Synthetic polypeptide
HGEGTFTSDVSSYLEGQAAREFIAWLVRGKGRRK

SEQ ID NO: 2301 - protein, 32 aa, Artificial Sequence
  Description of Artificial Sequence: Synthetic polypeptide
HAEGTFTSDVSSYLEGQAAREFIAWLVRGRGK

SEQ ID NO: 2302 - protein, 33 aa, Artificial Sequence; identical to SEQ ID NO: 2281
  Description of Artificial Sequence: Synthetic polypeptide

SEQ ID NO: 2303 - protein, 34 aa, Artificial Sequence; identical to SEQ ID NO: 2282
  Description of Artificial Sequence: Synthetic polypeptide

SEQ ID NO: 2304 - protein, 35 aa, Artificial Sequence
  Description of Artificial Sequence: Synthetic polypeptide
HAEGTFTSDVSSYLEGQAAREFIAWLVRGRGRREK

SEQ ID NO: 2305 - protein, 36 aa, Artificial Sequence
  Description of Artificial Sequence: Synthetic polypeptide
HAEGTFTSDVSSYLEGQAAREFIAWLVRGRGRREFK

SEQ ID NO: 2306 - protein, 37 aa, Artificial Sequence
  Description of Artificial Sequence: Synthetic polypeptide
HAEGTFTSDVSSYLEGQAAREFIAWLVRGRGRREFPK

SEQ ID NO: 2307 - protein, 38 aa, Artificial Sequence
  Description of Artificial Sequence: Synthetic polypeptide
HAEGTFTSDVSSYLEGQAAREFIAWLVRGRGRREFPEK

SEQ ID NO: 2308 - protein, 39 aa, Artificial Sequence
  Description of Artificial Sequence: Synthetic polypeptide
HAEGTFTSDVSSYLEGQAAREFIAWLVRGRGRREFPEEK

SEQ ID NO: 2309 - protein, 38 aa, Artificial Sequence
  Description of Artificial Sequence: Synthetic polypeptide
HDEFERHAEGTFTSDVSSYLEGQAAREFIAWLVRGRGK

SEQ ID NO: 2310 - protein, 39 aa, Artificial Sequence
  Description of Artificial Sequence: Synthetic polypeptide
HDEFERHAEGTFTSDVSSYLEGQAAREFIAWLVRGRGRK

SEQ ID NO: 2311 - protein, 40 aa, Artificial Sequence
  Description of Artificial Sequence: Synthetic polypeptide
HDEFERHAEGTFTSDVSSYLEGQAAREFIAWLVRGRGRRK

SEQ ID NO: 2312 - protein, 41 aa, Artificial Sequence
  Description of Artificial Sequence: Synthetic polypeptide
HDEFERHAEGTFTSDVSSYLEGQAAREFIAWLVRGRGRREK

SEQ ID NO: 2313 - protein, 42 aa, Artificial Sequence
  Description of Artificial Sequence: Synthetic polypeptide
HDEFERHAEGTFTSDVSSYLEGQAAREFIAWLVRGRGRREFK

SEQ ID NO: 2314 - protein, 43 aa, Artificial Sequence
  Description of Artificial Sequence: Synthetic polypeptide
HDEFERHAEGTFTSDVSSYLEGQAAREFIAWLVRGRGRREFPK

SEQ ID NO: 2315 - protein, 44 aa, Artificial Sequence
  Description of Artificial Sequence: Synthetic polypeptide
HDEFERHAEGTFTSDVSSYLEGQAAREFIAWLVRGRGRREFPEK

SEQ ID NO: 2316 - protein, 45 aa, Artificial Sequence
  Description of Artificial Sequence: Synthetic polypeptide
HDEFERHAEGTFTSDVSSYLEGQAAREFIAWLVRGRGRREFPEEK

SEQ ID NO: 2317 - protein, 38 aa, Artificial Sequence
  Description of Artificial Sequence: Synthetic polypeptide
DEFERHAEGTFTSDVSSYLEGQAAREFIAWLVRGRGRK

SEQ ID NO: 2318 - protein, 39 aa, Artificial Sequence
  Description of Artificial Sequence: Synthetic polypeptide
DEFERHAEGTFTSDVSSYLEGQAAREFIAWLVRGRGRRK

SEQ ID NO: 2319 - protein, 40 aa, Artificial Sequence
  Description of Artificial Sequence: Synthetic polypeptide
DEFERHAEGTFTSDVSSYLEGQAAREFIAWLVRGRGRREK

SEQ ID NO: 2320 - protein, 41 aa, Artificial Sequence
  Description of Artificial Sequence: Synthetic polypeptide
DEFERHAEGTFTSDVSSYLEGQAAREFIAWLVRGRGRREFK

SEQ ID NO: 2321 - protein, 42 aa, Artificial Sequence
  Description of Artificial Sequence: Synthetic polypeptide
DEFERHAEGTFTSDVSSYLEGQAAREFIAWLVRGRGRREFPK

SEQ ID NO: 2322 - protein, 43 aa, Artificial Sequence
  Description of Artificial Sequence: Synthetic polypeptide
DEFERHAEGTFTSDVSSYLEGQAAREFIAWLVRGRGRREFPEK

SEQ ID NO: 2323 - protein, 44 aa, Artificial Sequence
  Description of Artificial Sequence: Synthetic polypeptide
DEFERHAEGTFTSDVSSYLEGQAAREFIAWLVRGRGRREFPEEK

SEQ ID NO: 2324 - protein, 36 aa, Artificial Sequence
  Description of Artificial Sequence: Synthetic polypeptide
EFERHAEGTFTSDVSSYLEGQAAREFIAWLVRGRGK

SEQ ID NO: 2325 - protein, 37 aa, Artificial Sequence
  Description of Artificial Sequence: Synthetic polypeptide
EFERHAEGTFTSDVSSYLEGQAAREFIAWLVRGRGRK

SEQ ID NO: 2326 - protein, 38 aa, Artificial Sequence
  Description of Artificial Sequence: Synthetic polypeptide
EFERHAEGTFTSDVSSYLEGQAAREFIAWLVRGRGRRK

SEQ ID NO: 2327 - protein, 39 aa, Artificial Sequence
  Description of Artificial Sequence: Synthetic polypeptide
EFERHAEGTFTSDVSSYLEGQAAREFIAWLVRGRGRREK

SEQ ID NO: 2328 - protein, 40 aa, Artificial Sequence
  Description of Artificial Sequence: Synthetic polypeptide
EFERHAEGTFTSDVSSYLEGQAAREFIAWLVRGRGRREFK

SEQ ID NO: 2329 - protein, 41 aa, Artificial Sequence
  Description of Artificial Sequence: Synthetic polypeptide
EFERHAEGTFTSDVSSYLEGQAAREFIAWLVRGRGRREFPK

SEQ ID NO: 2330 - protein, 42 aa, Artificial Sequence
  Description of Artificial Sequence: Synthetic polypeptide
EFERHAEGTFTSDVSSYLEGQAAREFIAWLVRGRGRREFPEK

SEQ ID NO: 2331 - protein, 43 aa, Artificial Sequence
  Description of Artificial Sequence: Synthetic polypeptide
EFERHAEGTFTSDVSSYLEGQAAREFIAWLVRGRGRREFPEEK

SEQ ID NO: 2332 - protein, 35 aa, Artificial Sequence
  Description of Artificial Sequence: Synthetic polypeptide
FERHAEGTFTSDVSSYLEGQAAREFIAWLVRGRGK

SEQ ID NO: 2333 - protein, 36 aa, Artificial Sequence
  Description of Artificial Sequence: Synthetic polypeptide
FERHAEGTFTSDVSSYLEGQAAREFIAWLVRGRGRK

SEQ ID NO: 2334 - protein, 37 aa, Artificial Sequence
  Description of Artificial Sequence: Synthetic polypeptide
FERHAEGTFTSDVSSYLEGQAAREFIAWLVRGRGRRK

SEQ ID NO: 2335 - protein, 38 aa, Artificial Sequence
  Description of Artificial Sequence: Synthetic polypeptide
FERHAEGTFTSDVSSYLEGQAAREFIAWLVRGRGRREK

SEQ ID NO: 2336 - protein, 39 aa, Artificial Sequence
  Description of Artificial Sequence: Synthetic polypeptide
FERHAEGTFTSDVSSYLEGQAAREFIAWLVRGRGRREFK

SEQ ID NO: 2337 - protein, 40 aa, Artificial Sequence
  Description of Artificial Sequence: Synthetic polypeptide
FERHAEGTFTSDVSSYLEGQAAREFIAWLVRGRGRREFPK

SEQ ID NO: 2338 - protein, 41 aa, Artificial Sequence
  Description of Artificial Sequence: Synthetic polypeptide
FERHAEGTFTSDVSSYLEGQAAREFIAWLVRGRGRREFPEK

SEQ ID NO: 2339 - protein, 42 aa, Artificial Sequence
  Description of Artificial Sequence: Synthetic polypeptide
FERHAEGTFTSDVSSYLEGQAAREFIAWLVRGRGRREFPEEK

SEQ ID NO: 2340 - protein, 34 aa, Artificial Sequence
  Description of Artificial Sequence: Synthetic polypeptide
ERHAEGTFTSDVSSYLEGQAAREFIAWLVRGRGK

SEQ ID NO: 2341 - protein, 35 aa, Artificial Sequence
  Description of Artificial Sequence: Synthetic polypeptide
ERHAEGTFTSDVSSYLEGQAAREFIAWLVRGRGRK

SEQ ID NO: 2342 - protein, 36 aa, Artificial Sequence
  Description of Artificial Sequence: Synthetic polypeptide
ERHAEGTFTSDVSSYLEGQAAREFIAWLVRGRGRRK

SEQ ID NO: 2343 - protein, 37 aa, Artificial Sequence
  Description of Artificial Sequence: Synthetic polypeptide
ERHAEGTFTSDVSSYLEGQAAREFIAWLVRGRGRREK

SEQ ID NO: 2344 - protein, 38 aa, Artificial Sequence
  Description of Artificial Sequence: Synthetic polypeptide
ERHAEGTFTSDVSSYLEGQAAREFIAWLVRGRGRREFK

SEQ ID NO: 2345 - protein, 39 aa, Artificial Sequence
  Description of Artificial Sequence: Synthetic polypeptide
ERHAEGTFTSDVSSYLEGQAAREFIAWLVRGRGRREFPK

SEQ ID NO: 2346 - protein, 40 aa, Artificial Sequence
  Description of Artificial Sequence: Synthetic polypeptide
ERHAEGTFTSDVSSYLEGQAAREFIAWLVRGRGRREFPEK

SEQ ID NO: 2347 - protein, 41 aa, Artificial Sequence
  Description of Artificial Sequence: Synthetic polypeptide
ERHAEGTFTSDVSSYLEGQAAREFIAWLVRGRGRREFPEEK

SEQ ID NO: 2348 - protein, 33 aa, Artificial Sequence
  Description of Artificial Sequence: Synthetic polypeptide
RHAEGTFTSDVSSYLEGQAAREFIAWLVRGRGK

SEQ ID NO: 2349 - protein, 34 aa, Artificial Sequence
  Description of Artificial Sequence: Synthetic polypeptide
RHAEGTFTSDVSSYLEGQAAREFIAWLVRGRGRK

SEQ ID NO: 2350 - protein, 35 aa, Artificial Sequence
  Description of Artificial Sequence: Synthetic polypeptide
RHAEGTFTSDVSSYLEGQAAREFIAWLVRGRGRRK

SEQ ID NO: 2351 - protein, 36 aa, Artificial Sequence
  Description of Artificial Sequence: Synthetic polypeptide
RHAEGTFTSDVSSYLEGQAAREFIAWLVRGRGRREK

SEQ ID NO: 2352 - protein, 37 aa, Artificial Sequence
  Description of Artificial Sequence: Synthetic polypeptide
RHAEGTFTSDVSSYLEGQAAREFIAWLVRGRGRREFK

SEQ ID NO: 2353 - protein, 38 aa, Artificial Sequence
  Description of Artificial Sequence: Synthetic polypeptide
RHAEGTFTSDVSSYLEGQAAREFIAWLVRGRGRREFPK

SEQ ID NO: 2354 - protein, 39 aa, Artificial Sequence
  Description of Artificial Sequence: Synthetic polypeptide
RHAEGTFTSDVSSYLEGQAAREFIAWLVRGRGRREFPEK

SEQ ID NO: 2355 - protein, 40 aa, Artificial Sequence
  Description of Artificial Sequence: Synthetic polypeptide
RHAEGTFTSDVSSYLEGQAAREFIAWLVRGRGRREFPEEK

SEQ ID NO: 2356 - protein, 38 aa, Artificial Sequence
  Description of Artificial Sequence: Synthetic polypeptide
HDEFERHAEGTFTSDVSSYLEGQAAREFIAWLVKGRGK

SEQ ID NO: 2357 - protein, 38 aa, Artificial Sequence
  Description of Artificial Sequence: Synthetic polypeptide
HDEFERHAEGTFTSDVSSYLEGQAAKEFIAWLVRGRGK

SEQ ID NO: 2358 - protein, 38 aa, Artificial Sequence
  Description of Artificial Sequence: Synthetic polypeptide
HDEFERHAEGTFTSDVSSYLEGQAAREFIAWLVRGKGK

SEQ ID NO: 2359 - protein, 32 aa, Artificial Sequence
  Description of Artificial Sequence: Synthetic polypeptide
HAEGTFTSDVSSYLEGQAAREFIAWLVKGRGK

SEQ ID NO: 2360 - protein, 32 aa, Artificial Sequence
  Description of Artificial Sequence: Synthetic polypeptide
HAEGTFTSDVSSYLEGQAAKEFIAWLVRGRGK

SEQ ID NO: 2361 - protein, 32 aa, Artificial Sequence
  Description of Artificial Sequence: Synthetic polypeptide
HAEGTFTSDVSSYLEGQAAREFIAWLVRGKGK

SEQ ID NO: 2362 - protein, 32 aa, Artificial Sequence; identical to SEQ ID NO: 2301
  Description of Artificial Sequence: Synthetic polypeptide

SEQ ID NO: 2363 - protein, 39 aa, Artificial Sequence
  Description of Artificial Sequence: Synthetic polypeptide
HDEFERHAEGTFTSDVSSYLEGQAAREFIAWLVKGRGRK

SEQ ID NO: 2364 - protein, 39 aa, Artificial Sequence
  Description of Artificial Sequence: Synthetic polypeptide
HDEFERHAEGTFTSDVSSYLEGQAAKEFIAWLVRGRGRK

SEQ ID NO: 2365 - protein, 39 aa, Artificial Sequence
  Description of Artificial Sequence: Synthetic polypeptide
HDEFERHAEGTFTSDVSSYLEGQAAREFIAWLVRGKGRK

SEQ ID NO: 2366 - protein, 33 aa, Artificial Sequence; identical to SEQ ID NO: 2285
  Description of Artificial Sequence: Synthetic polypeptide

SEQ ID NO: 2367 - protein, 33 aa, Artificial Sequence
  Description of Artificial Sequence: Synthetic polypeptide
HAEGTFTSDVSSYLEGQAAKEFIAWLVRGRGRK

SEQ ID NO: 2368 - protein, 33 aa, Artificial Sequence; identical to SEQ ID NO: 2287
  Description of Artificial Sequence: Synthetic polypeptide

SEQ ID NO: 2369 - protein, 32 aa, Artificial Sequence
  Description of Artificial Sequence: Synthetic polypeptide
HGEGTFTSDVSSYLEGQAAREFIAWLVKGRGK

SEQ ID NO: 2370 - protein, 32 aa, Artificial Sequence
  Description of Artificial Sequence: Synthetic polypeptide
HGEGTFTSDVSSYLEGQAAREFIAWLVRGKGK

SEQ ID NO: 2371 - DNA, 42 bp, Artificial Sequence
  Description of Artificial Sequence: Synthetic oligonucleotide
  CDS (1)..(39)
  modified_base (7)..(7): a, c, t, or g
  modified_base (9)..(9): a, c, t, or g
  modified_base (10)..(10): a, c, t, or g
  modified_base (12)..(12): a, c, t, or g
  see specification as filed for detailed description of substitutions and preferred embodiments
atggctnvnnvngctggctctccaacctccactgaggaaggt

SEQ ID NO: 2372 - protein, 13 aa, Artificial Sequence
  Description of Artificial Sequence: Synthetic peptide
  misc_feature (3)..(3): The 'Xaa' at location 3 stands for Ala, Pro, Ser, Thr, Gly, or Glu.
  misc_feature (4)..(4): The 'Xaa' at location 4 stands for Ala, Pro, Ser, Thr, Gly, or Glu.
  see specification as filed for detailed description of substitutions and preferred embodiments
MAXXAGSPTSTEE

SEQ ID NO: 2373 - DNA, 42 bp, Artificial Sequence
  Description of Artificial Sequence: Synthetic oligonucleotide
  CDS (1)..(39)
  modified_base (7)..(7): a, c, t, or g
  modified_base (9)..(9): a, c, t, or g
  modified_base (10)..(10): a, c, t, or g
  modified_base (12)..(12): a, c, t, or g
  see specification as filed for detailed description of substitutions and preferred embodiments
atggctnvnnvngaaagcgcaacccctgagtccggtccaggt

SEQ ID NO: 2374 - protein, 13 aa, Artificial Sequence
  Description of Artificial Sequence: Synthetic peptide
  misc_feature (3)..(3): The 'Xaa' at location 3 stands for Ala, Pro, Ser, Thr, Gly, or Glu.
  misc_feature (4)..(4): The 'Xaa' at location 4 stands for Ala, Pro, Ser, Thr, Gly, or Glu.
  see specification as filed for detailed description of substitutions and preferred embodiments
MAXXESATPESGP

SEQ ID NO: 2375 - DNA, 42 bp, Artificial Sequence
  Description of Artificial Sequence: Synthetic oligonucleotide
  CDS (1)..(39)
  modified_base (7)..(7): a, c, t, or g
  modified_base (9)..(9): a, c, t, or g
  modified_base (10)..(10): a, c, t, or g
  modified_base (12)..(12): a, c, t, or g
  see specification as filed for detailed description of substitutions and preferred embodiments
atggctnvnnvnactccgtctggtgctaccggttccccaggt

SEQ ID NO: 2376 - protein, 13 aa, Artificial Sequence
  Description of Artificial Sequence: Synthetic peptide
  misc_feature (3)..(3): The 'Xaa' at location 3 stands for Ala, Pro, Ser, Thr, Gly, or Glu.
  misc_feature (4)..(4): The 'Xaa' at location 4 stands for Ala, Pro, Ser, Thr, Gly, or Glu.
  see specification as filed for detailed description of substitutions and preferred embodiments
MAXXTPSGATGSP

SEQ ID NO: 2377 - protein, 5 aa, Artificial Sequence
  Description of Artificial Sequence: Synthetic polypeptide
KPETG
